(19) United States
(12) Patent Application Publication
(10) Pub. No.: US 2005/0043513 A1
(43) Pub. Date: Feb. 24, 2005

(54) Mouse olfactory receptor gene superfamily

(76) Inventors: Stuart Firestein, New Milford, CT (US); Xinmin Zhang, Carlsbad, CA (US)

Correspondence Address: BAKER & BOTTS, 30 ROCKEFELLER PLAZA, NEW YORK, NY, 10112, US

(21) Appl. No.: 10/774,355

(22) Filed: Feb. 6, 2004

Related U.S. Application Data
(63) Continuation of application No. PCT/US02/25556, filed on Aug. 9, 2002.
(60) Provisional application No. 60/311,159, filed on Aug. 9, 2001.
(60) Provisional application No. 60/339,694, filed on Dec. 12, 2001.

(51) Int. Cl. C07K 14/705; C12Q 1/68; C07H 21/04

(52) U.S. Cl. 530/350; 435/6; 435/69.1; 435/320.1; 435/325; 536/23.5

(57) ABSTRACT

Olfactory receptors (ORs) encompass the largest gene superfamily in vertebrates. The present invention relates to data mining methods capable of identifying gene family members and particularly mouse OR (MOR) gene family members. The data mining method of the present invention has been used to identify 1296 mouse ORs from the nearly complete Celera mouse genome by a comprehensive data mining effort. MOR polypeptides, proteins, and nucleic acid molecules are disclosed. In addition to isolated, full-length MOR proteins, the invention further provides for MOR fusion proteins and anti-MOR antibodies. The invention also provides MOR nucleic acid molecules, recombinant expression vectors containing a nucleic acid molecule of the invention, host cells into which the expression vectors have been introduced and non-human transgenic animals in which a MOR gene has been introduced or disrupted. The MORs are useful for identifying compounds for treating anosmias, pest control and for developing better odorants, such as perfumes and food enhancers.

[0001] The present invention is a continuation of pending International Patent Application PCT/US02/25556 filed Aug. 9, 2002, published in English as International Publication No. WO03/094088 on Nov. 13, 2004, which claims priority to U.S. Provisional Patent Application Ser. Nos. 60/311,159, filed Aug. 9, 2001, and 60/339,694, filed Dec. 12, 2001, all of which are incorporated herein by reference in their entirety.

This invention was made with government support from US NIDCD and HFSP. Therefore, the government has certain rights in the invention.

### FIELD OF THE INVENTION

[0003] The present invention relates to the identification, isolation and characterization of mouse olfactory receptor (OR) polypeptides, the nucleic acids that encode them and methods of using the mouse ORs of the present invention.

### BACKGROUND OF THE INVENTION

[0004] The detection of environmental chemicals, commonly called odors, is mediated by peripheral olfactory organs of varied complexity in virtually all metazoans. Specialized sensory neurons initiate perception by detecting ambient molecules that interact with protein receptors in neuronal membranes. A pathway for olfactory signal transduction is initiated when the binding of odors to specific odor receptors activates specific G proteins. The G proteins stimulate a cascade of intracellular signaling events leading to the generation of an action potential which is propagated along the olfactory sensory axon to the brain. Odor receptors (ORs) have been identified as receptors that recognize odorant molecules. The ORs belong to the superfamily of seven transmembrane domain proteins, G-protein coupled receptors (GPCRs). A family of receptor guanylyl cyclases have been proposed as receptors for odors or pheromones. (Gibson, A. D. & Garbers, D. L., “Guanylyl cyclases as a family of putative odorant receptors,” Annu Rev Neurosci 23, pp.417-39 (2000)).

[0005] ORs were initially discovered in rat as a diverse multigene family characterized by seven transmembrane domain proteins. (Buck, L. & Axel, R. “A novel multigene family may encode odorant receptors: a molecular basis for odor recognition,” Cell 65, pp. 175-87. (1991)). They have since been identified in various species, including both invertebrates, e.g. nematode and fruit fly, and vertebrates, e.g. fish, amphibians, lizards, birds and mammals. (Mombaerts, P., “Seven-transmembrane proteins as odorant and chemosensory receptors,” Science 286, pp. 707-11 (1999)).

[0006] There are two classes of OR genes, class I (fish-like receptors) and class II (mammalian-like or tetrapod receptors). Structural analysis indicate that they differ in extracellular loop 3, which is likely to contribute to ligand specificity. (Freitag, J., Ludwig, G., Andreini, I., Rossler, P. & Breer, H. “Olfactory receptors in aquatic and terrestrial vertebrates,” J Comp Physiol [A] 183, pp. 635-50. (1998)). It has been hypothesized that class I receptors are activated by water-soluble odorants, whereas class II receptors are activated by volatile compounds. (Mezler, M., Fleischer, J. & Breer, H. Characteristic features and ligand specificity of the two olfactory receptor classes from Xenopus laevis. J Exp Biol 204, 2987-97. (2001)).

[0007] Class I receptors have been identified in fish and subsequently in the frog. (Ngai, J., Dowling, M. M., Buck, L., Axel, R. & Chess, A. “The family of genes encoding odorant receptors in the channel catfish,” Cell 72, pp.657-66. (1993); Freitag, J., Krieger, J., Strotmann, J. & Breer, H. “Two classes of olfactory receptors in Xenopus laevis,” Neuron 15, pp. 1383-92. (1995); Freitag, J., Ludwig, G., Andreini, I., Rossler, P. & Breer, H. “Olfactory receptors in aquatic and terrestrial vertebrates,” J Comp Physiol [A] 183, pp. 635-50. (1998)). Class I ORs had been previously thought to be evolutionary relics in mammals, however, a relatively large number of intact Class I ORs are found in the human genome. (Glusman, G., Yanai, I., Rubin, I. & Lancet, D. “The complete human olfactory subgenome,” Genome Res 11, pp. 685-702 (2001); Freitag, J., Ludwig, G., Andreini, I., Rossler, P. & Breer, H. “Olfactory receptors in aquatic and terrestrial vertebrates,” J Comp Physiol [A] 183, pp. 635-50. (1998)).

[0008] Class I ORs are appear to be prevalent in the mammalian genome, and may play important roles in mammalian olfaction. Class I ORs are expressed in the most dorsal zone of the olfactory epithelium. (Bulger, M. et al. “Conservation of sequence and structure flanking the mouse and human beta-globin loci: the beta-globin genes are embedded within an array of odorant receptor genes.,” Proc Natl Acad Sci USA 96, pp. 5129-34. (1999); Conzelmann, S. et al. “A novel brain receptor is expressed in a distinct population of olfactory sensory neurons,” Eur J Neurosci 12, pp. 3926-34. (2000); Malnic, B., Hirono, J., Sato, T. & Buck, L. B. “Combinatorial receptor codes for odors,” Cell 96, pp. 713-23. (1999); Raming, K., Konzelmann, S. & Breer, H. “Identification of a novel G-protein coupled receptor expressed in distinct brain regions and a defined olfactory zone,” Receptors Channels 6, pp.141-51(1998)).

[0009] Class II receptors are primarily found in tetrapod species. These receptors have been found in all four zones of the olfactory epithelium. In mammals, the olfactory epithelium appears to be organized into distinct topographic regions or zones in which expression of a particular receptor gene appears to be restricted to one of the four zones in the epithelium. (Ressler et al. “A zonal organization of odorant receptor gene expression in the olfactory epithelium,” Cell 73, pp.597-609 (1993); Vasser et al. “Topographic organization of sensory projections to the olfactory bulb,” Cell 79, pp.981-991 (1994)). In addition, it each neuron expresses only one or a few odorant receptors.

[0010] In mammals, ORs constitute the largest gene superfamily in the genome. It has been estimated that there are approximately 1000 ORs in the mouse and rat, approximately 500-750 ORs in human, and approximately 100 ORs in fish. (Buck, L. B. “Information coding in the vertebrate olfactory system,” Annu Rev Neurosci 19, pp.517-44 (1996) and Mombaerts, P. “Molecular biology of odorant receptors in vertebrates,” Annu Rev Neurosc 22, pp. 487-509 (1999)).

[0011] Sequence information relating to OR genes has been obtained through a variety of strategies, including the use of degenerate PCR primers on cDNA or genomic DNA templates. These efforts have resulted in gene fragments with a small number of full-length genes recovered. Both primer bias and possible recombination among highly related sequences lead to the failure to detect many genes. (Glusman, G. et al. “Sequence, structure, and evolution of a complete human olfactory receptor gene cluster,” Genomics 63, pp. 227-45. (2000); Glusman, G., Clifton, S., Roe, B. & Lancet, D. “Sequence analysis in the olfactory receptor gene cluster on human chromosome 17: recombinatorial events affecting receptor diversity,” Genomics. 37(2), pp.147-60 (1996)). As a result, relatively few OR gene sequences have been identified.

[0012] The availability of genome sequences has lead to the developmental of various analytical approaches for identifying members of gene families. Public databases containing nearly complete human, mouse, rat, Drosophila, and yeast genomes are available for data mining. Keyword and homology based searches applying various algorithms have been used to identify gene and protein families. As an example, U.S. Pat. No. 6,395,889 discloses a method of identifying protease family members from various protease families using known consensus motifs in TBLASTN searches or Hidden Markov Model (HMM) motifs or both. This patent discloses the application of HMM to generate consensus sequences specific for protease family members. The consensus sequences are used as queries in TBLASTN searches.

[0013] Following the release of the human genome, the human OR repertoire was explored at the whole genome level. (Glusman, G., Yanai, I., Rubin, I. & Lancet, D. “The complete human olfactory subgenome,” Genome Res 11, pp. 685-702 (2001); Zozulya, S., Echeverri, F. & Nguyen, T. “The human olfactory receptor repertoire,” Genome Biol 2, pp.1-12 (2001)). Approximately 900 ORs, distributed within 24 clusters throughout the genome (except chromosome 20 and Y), were discovered in human, with a 60% of these apparently being pseudogenes. It is hypothesized that the degeneration of ORs in humans is due to the smaller role of olfaction in comparison to vision and hearing.

[0014] In contrast to the fewer than 350 intact OR genes found in human, mice are thought to have a much larger repertoire of ORs. Since mice have become the experimental animal of choice in olfactory studies, due largely to the success of gene targeting in mice, the complete mouse OR repertoire would therefore be desirable. Until recently only ˜100 full-length mouse OR sequences were available in the public database, with more than half of these obtained by sequencing genomic regions of known OR gene clusters. (Xie, S. Y., Feinstein, P. & Mombaerts, P. “Characterization of a cluster comprising approximately 100 odorant receptor genes in mouse,” Mamm Genome 11, pp. 1070-8 (2000); Hoppe, R., Weimer, M., Beck, A., Breer, H. & Strotmann, J. “Sequence analyses of the olfactory receptor gene cluster mOR37 on mouse chromosome 4,” Genomics 66, pp. 284-95 (2000); Lane, R. P. et al. “Genomic analysis of orthologous mouse and human olfactory receptor loci,” Proc Natl Acad Sci USA 98, pp. 7390-5. (2001)). Thus, a whole genomic approach is likely the most efficient and thorough means to retrieve the complete OR repertoire.

[0015] In May 2001, the Celera mouse genome was released (www.celera.com). The present invention addresses the need for identifying the complete mouse OR repertoire by providing novel data mining methods. This method was used with the nearly complete Celera mouse genome to identify the mouse OR repertoire which comprises of approximately 1300 ORs.

### SUMMARY OF THE INVENTION

[0016] The present invention relates to a data mining method of identifying candidate gene sequences. The data mining method of the present invention uses the novel combination of a low stringency TBLASTN search and Hidden Markov Model (HMM) profiles designed from known OR sequences to identify putative OR candidates for further analysis. The low stringency TBLASTN search allows for the identification of a greater pool of OR candidates.

[0017] In another aspect, the present invention consists of MOR (mouse olfactory receptor) nucleic acid sequences identified using the method of the present invention (DNA and RNA), MOR proteins and peptides, and antibodies raised against the MOR proteins. The MOR nucleic acid sequences, proteins and peptides of the present invention are useful for identifying compounds which can be used to treat anosmias, for pest control and for the development of deodorants.

[0018] In still another aspect, the present invention consists of host cells and animals genetically engineered to express MOR proteins and peptides, DNA vectors that contain any of the foregoing MOR nucleic acid sequences and/or their complements (i.e., antisense), and DNA expression vectors that contain any of the foregoing MOR nucleic acid sequences operatively linked to a regulatory element that directs the expression of the MOR nucleic acid sequences.

### BRIEF DESCRIPTION OF THE DRAWINGS

[0019] The present invention may be better understood from the following detailed description of exemplary embodiments with reference to the attached drawings in which:

[0020] FIG. 1 shows a phylogenetic tree of Mouse Olfactory Receptor families, where FIG. 1 shows a phylogenetic tree of the consensus sequences of mouse OR families in which bootstrap values are shown at nodes with >50% support and the tree was rooted using human and mouse melanocyte stimulating hormone receptors (MSH-R); and FIGS. 1a-c shows a list of all the families in the same order as in a) (1-41 are Class I families, 101-286 are Class II families).

[0021] FIGS. 2a and 2b show the chromosomal distribution of Mouse OR Genes, where FIG. 2a depicts mouse chromosomes, drawn according to the Celera scaffold assembly, showing the number of ORs at various positions along the chromosomes; and FIG. 2b is a graph showing the number of intact genes (dark) and pseudogenes (shaded) on each chromosome.

[0022] FIG. 3 is a schematic diagram demonstrating the distribution of OR Clusters.

[0023] FIG. 4 is a schematic diagram showing the sequence logos for the Open Reading Frames of Class I and Class II ORs.

[0024] FIG. 5 shows the unrooted phylogenetic tree of human and mouse ORs, where FIG. 5a shows an unrooted phylogenetic tree of the consensus sequences of mouse and human OR families; and FIG. 5b shows an unrooted phylogenetic tree of the intact full length ORs belonging to families in the group shaded in 5a; and FIG. 5c shows an unrooted phylogenetic tree of the intact full length ORs of the Iva1 ORs (Mouse OR families 258 and 259) and families close to them.

[0025] FIG. 6 is a flow diagram of the data mining method of the present invention.

[0026] FIGS. 7a and 7b are flow diagrams of an exemplary embodiment of the data mining method of the present invention, where FIG. 7a is a flow diagram of a profile HMM OR classifier; and FIG. 7b is a flow diagram of mouse OR data mining.

### DETAILED DESCRIPTION OF THE INVENTION

[0027] In accordance with the present invention, a novel data mining method for identifying candidate genes in a gene family is provided. In a preferred embodiment of the invention, candidate MOR genes are identified using the data mining method of the invention from mouse genomic databases.

[0028] Referring to FIG. 6, known sequences from a gene family 1 that has been well characterized in a reference organism may be used together with a limited number of known sequences of the same gene family from a candidate organism 2. To obtain gene sequences of the reference and candidate organism, homology-based searches are conducted. A variety of known algorithms are disclosed publicly and a variety of publicly and commercially available software can be used. Examples include, but are not limited to, MacPattern (EMBL), BLASTN(NCBI), BLASTX(NCBI) and FASTA (University of Virginia). Sequences can be extracted from public databases, such as the National Center for Biotechnology (NCBI), Human Olfactory Receptor Data Exploratorium (HORDE), the Olfactory Receptor Database (ORDB), and mouse EST database. In a preferred embodiment of the invention, full length MAMMALIAN OR database, a collection of all the known full length human and mouse ORs from HORDE, ORDB and Genbank, and non-OR GPCR database, a collection of GPCRs excluding ORs from SWISS_PROT Annotated Protein Sequence Database, are used. According to the invention, any DNA sequence database may be used in the data mining method of the present invention.

[0029] After having obtained the reference and candidate organism gene family sequences, a full characterization of the gene family is conducted. This may be accomplished by applying a Hidden Markov Model (HMM) to the reference organism and candidate organism gene family sequences 3 to build a HMM profile 4. HMM 3 is a probabilistic approach which analyzes consensus primary structures of gene families. (See Eddy, S. R. Curr Opin Str Bio 6:361-365 (1996); Durbin, R., S. R. Eddy, et al. (1998). “Biological sequence analysis: probalistic models of proteins and nucleic acids”. Cambridge, UK, Cambridge University Press; Eddy, S. R. (1998). “Profile hidden Markov models.” Bioinformatics 14(9): 755-63.)

[0030] To facilitate the building of HMM profiles, an alignment software program, such as ClustalW or Clustal X, may be used to align the gene family sequences from the reference organism. Alternatives to ClustalW include, but are not limited to, MultAlin, MSA (Multiple Sequence Alignment), DIALIGN, and MACAW (Multiple Alignment Construction & Analysis Workbench). (Corpet, F. “Multiple sequence alignment with hierarchical clustering” 1988, Nucl. Acids Res., 16 (22), 10881-10890; Lipman, D J, Altschul S F, Kececioglu J D: “A Tool for Multiple Sequence Alignment.” Proc. Natl. Acad. Sci. USA 86:4412-4415, 1989; B. Morgenstern, K. Frech, A. Dress, T. Werner: DIALIGN: Finding local similarities by multiple sequence alignment. Bioinformatics, 14, 1998, 290-294). The alignment produced may then be used to build the profile HMMs. More than one profile HMM may be built if the gene family contains subfamilies. A hmmsearch program found in the HMMER software package can be used to generate the profile HMM. Other non-limiting examples of alignment software include Sequence Alignment and Modeling System (SAM) (UC Santa Cruz) and HMMpro (NetID, Inc.).

[0031] Again referring to FIG. 6, query sequences 5 (which may be amino acid sequences identified as gene family members of the reference organism or the candidate organism, or may be any amino acid sequence of the gene family from any organism identified by any means known in the art) are subjected to a TBLASTN search 6 (http://www.ncbi.nlm.nih.gov/BLAST/blast_overview.html) against a candidate organism sequence database (which preferably comprises a nearly complete set of sequence information from the genome of the candidate organism, but can be incomplete). In one embodiment, candidate nucleic acid sequences are obtained using known reference organism sequences as query sequences and applying a TBLASTN search to mine a nucleic acid database of the candidate organism. A TBLASTN search 6 allows for the identification of candidate nucleic acid sequences 7 by comparing a query amino acid sequence 5 to nucleic acid sequence databases that are dynamically translated into amino acid sequences. The TBLASTN search is conducted using low threshold or low stringency values to obtain a large pool of potential candidate sequences. In a preferred embodiment of the invention, an E-value of <10 is used in the TBLASTN search and all hits with an E-value <10 are collected. An E-value of <5 may also be used. Potential candidate open reading frames (ORFs) are then determined 8. Any program known in the art capable of translating DNA into protein can be used to determine potential candidate ORFs. As a non-limiting example, programs such as ORF finder (http://www.ncbi.nlm.nih.gov/gorf/gorf.html) maybe used.

[0032] The potential candidate ORFs obtained are compared with the profile HMMs 9 to obtain candidate sequences 10. In addition, the potential candidate sequences may be classified into subgroups corresponding to subfamilies during the comparison step.

[0033] The method may optionally comprise determining putative secondary structures of the potential candidate ORFs as described below in Example 1. These structures may be determined using the PredictProtein Server, (http;//cubic.bioc.columbia.edu/predictionprotein/) or the TMHMM server (http://www.cbs.dtu.dk/services/TMHMM/).

[0034] If candidate sequences are identified as putative pseudogenes (i.e. fragments, disruptions, etc.) they may optionally be subjected to conceptual translation using FASTY3 (http://http.virginia.edu/pub/fasta/). This algorithm aligns query DNA sequences with protein sequences and takes into consideration the possibility of frame shifts and premature stop codons to identify the putative undisrupted sequence of the gene. Candidates identified can also be subjected to BLAST searches through databases comprising only known genes from that gene family should the database exists.

[0035] The various identified candidate sequences may then be subjected to further analysis incorporating ORF discovery, profile HMM searches and BLASTP searches in an iterative process to determine full length sequences 11. Exhaustive iterative TBLASTN searching is preferably continued until no new candidate sequences are found.

[0036] FIGS. 7A and 7B are flow diagrams showing a preferred embodiment of the data mining method of the invention. Referring to FIG. 7B and described in Example 1, a TBLASTN search 803 for candidate OR sequences was applied to known reference organism (human) ORs 801 as query sequences. Alternatively, mouse sequences 802 may be used as the query sequences. The TBLASTN search 803 was conducted using low threshold or low stringency values (E-value <10) to obtain a large pool of potential candidate sequences by collecting all hits with an E-value <10. Potential ORFs were then determined 804. Any program known in the art capable of translating DNA into protein can be used to determine potential candidate ORFS. As a non-limiting example, programs such as ORF finder (http://www.ncbi.nlm.nih.gov/gorf/gorf.html) may be used.

[0037] Referring to FIG. 7A, known human and mouse OR sequences were subject to alignment using Clustal W and divided into class I ORs 701 and class II ORs 703. The class I ORs 701 and class 2 ORs 703 were used to build two profile HMMs, pHMMI 702 and pHMMII 704. This is further descried in detail in Example 1 below. The profile HMMs were built using the hmmsearch program found in the HMMER software package. These HMM profiles were compared with potential candidate ORs 705 and 706. E-values were determined for both comparisons 707 and 708, respectively. Log likelihood ratio (Log₁₀EI/EII) were then calculated 709. OR/non-OR was determined by the smaller E-value and ClassI/ClassII was determined by the log likelihood ratio as further discussed below in Example 1.

[0038] Again referring to FIG. 7B, potential candidate ORs 806 were obtained by comparison with the HMM profiles 805 obtained as described above and shown in FIG. 7A.

[0039] The method may optionally comprise determining putative secondary structures of the potential candidate OR ORFs as described below in Example 1. These structures may be determined using the PredictProtein Server, (http;//cubic.bioc.columbia.edu/predictionprotein/) or the TMHMM server (http://www.cbs.dtu.dk/services/TMHMM/) to obtain mouse OR sequences. The putative secondary structures of the potential candidate OR ORFs are then evaluated for structural characteristics of OR proteins, i.e. seven transmembrane domains, N terminal domain length of 10-40 amino acids, and C terminal domain length of 7-30 amino acids.

[0040] Candidate ORs were evaluated to determine whether they represented putative pseudogenes (i.e. fragments and/or disruptions) or full length sequences. Full length sequences were directly classified as sequences of the MOR database 809 and putative pseudogenes were subjected to conceptual translation using FASTY3 (http://http.virginia.edu/pub/fasta/) 808 to identify whether they represented full length sequences. The FASTY3 algorithm aligns query DNA sequences with protein sequences and takes into consideration the possibility of frame shifts and premature stop codons to identify the putative undisrupted sequence of the gene. Alternatively, putative undisrupted sequence can be obtained using FASTX3. Putative pseudogenes identified can also be subjected to BLAST searches through databases comprising only known genes from that gene family should the database exists. Any full length sequences identified from possible pseudogenes were also classified as sequences of the MOR database. The MOR database can be refined by the removal of duplicate sequences 810.

[0041] The various identified candidate sequences which were classified as members of the MOR database 809 were then be subjected to further analysis through iteration to further refine and develop the MOR database. Exhaustive iterative TBLASTN searching is preferably continued until no new candidate sequences are found.

[0042] The genomic organization of identified OR sequences were mapped and genomic or chromosomal localization of mapped OR sequences were evaluated for phylogenetic similarity as discussed in Example 5.

[0043] The invention further contemplates identifying any remaining MOR sequences as the mouse genomic databases become more complete.

[0044] Using the data mining method of the present invention, a nearly complete mouse olfactory receptor repertoire consisting of 1296 MOR genes (SEQ ID NOS: 1-1296) and 1296 MOR proteins (SEQ ID NOS: 1297-2592) was identified and characterized as discussed in Example 4.

[0045] Accordingly, another aspect of the present invention is directed to mouse olfactory receptor (MOR) nucleic acid sequences that encode MOR proteins, mutant MOR proteins, peptide fragments of MOR proteins, truncated MOR, and MOR fusion proteins. The sequences are set forth as SEQ ID NOS: 1-1296 in the attached sequence listing. These include, but are not limited to, nucleotide sequences encoding polypeptides or peptides corresponding to the transmembrane and/or cytoplasmic domains of MOR or portions of these domains. Of these sequences, SEQ ID NOS: 4-6, 8, 12-14, 16-27, 30-50, 52, 53, 55-69, 72-86, 88-92, 97-100, 102-121, 123, 125, 127-144, 146-152, 154-164, 167, 168, 171-173, 175-182, 184-191, 193, 194, 196-205, 207, 209-214, 216-219, 221-225, 227-245, 250-252, 254, 256-260, 264-270, 273-281, 285-292, 294, 296-300, 303, 304, 306-313, 315-318, 320, 322-329, 331-335, 339-352, 354, 355, 357-388, 391, 393-426, 428, 429, 432-468, 470-486, 488-495, 497-507, 509-513, 515-525, 527, 528, 532, 533, 535, 538, 540-542, 545-556, 558-563, 565-576, 578-597, 599-618, 620, 624-628, 630, 631, 637-656, 659-662, 665, 667-675, 677-683, 685-697, 701, 704-716, 719-738, 740-757, 759-766, 768-784, 786, 789-796, 800, 801, 803-812, 814-834, 836-865, 867-926, 928-1060, 1062-1094, 1096-1115, 1117-1126, 1129-1135, 1138-1144, 1146-1156, 1159-1165, 1168-1171, 1173-1175, 1177-1192, 1194-1196, 1198-1201, 1203, 1205-1227, 1229, 1232-1250, 1252, 1253, 1255-1258, 1260-1268, 1270-1272, 1274-1293, 1295 and 1296 have not been previously identified.

[0046] Alternative to the above-described method, MOR nucleotide sequences may be identified using a variety of different methods known to those skilled in the art. For example, a cDNA library constructed using RNA from a tissue known to express MOR can be screened using a labeled MOR probe. A genomic library may be screened to identify nucleic acid molecules encoding a MOR protein. Further, MOR nucleic acid sequences may be derived using PCR with two oligonucleotide primers designed on the basis of the MOR nucleotide sequences disclosed herein.

[0047] The present invention also contemplates DNA vectors that contain any of the foregoing MOR nucleic acid sequences and/or their complements, i.e., antisense. The DNA expression vectors may contain any of the foregoing MOR nucleic acid sequences operatively linked to a regulatory element that directs the expression of the MOR coding sequences. As used herein, regulatory elements include but are not limited to inducible and non-inducible promoters, enhancers, operators and other elements known to those skilled in the art that drive and regulate expression, as well as The present invention also provides for viral vectors comprising any of the foregoing MOR sequences and/or their complements. The present invention provides for proteins and peptides encoded by MOR nucleic acid sequences as set forth in SEQ ID NOS: 1297-2592. Of these sequences, SEQ ID NOS: 1300-1302, 1302, 1308-1310, 1312-1323, 1326-1346, 1348, 1349, 1351-1365, 1368-1382, 1384-1388, 1393-1396, 1398-1417, 1419, 1421, 1423-1440, 1442-1448, 1450-1460, 1463, 1464, 1467-1469, 1471-1478, 1480-1487, 1489, 1490, 1492-1501, 1503, 1505-1510, 1512-1515, 1517-1521, 1523-1541, 1546-1548, 1550, 1552-1556, 1560-1566, 1569-1577, 1581-1588, 1590, 1592-1596, 1599, 1600, 1602-1609, 1611-1614, 1616, 1618-1625, 1627-1631, 1635-1648, 1650, 1651, 1653-1684, 1687, 1689-1722, 1724, 1725, 1728-1764, 1766-1782, 1784-1791, 1793-1803, 1805-1809, 1811-1821, 1823, 1824, 1828, 1829, 1831, 1834, 1836-1838, 1841-1852, 1854-1859, 1861-1872, 1874-1893, 1895-1914, 1916, 1920-1924, 1926, 1927, 1933-1952, 1955-1958, 1961, 1963-1971, 1973-1979, 1981-1993, 1997, 2000-2012, 2015-2034, 2036-2053, 2055-2062, 2064-2080, 2082, 2085-2092, 2096, 2097, 2099-2108, 2110-2130, 2132-2161, 2163-2222, 2224-2356, 2358-2390, 2392-2411, 2413-2422, 2425-2431, 2434-2440, 2442-2452, 2455-2461, 2464-2467, 2469-2471, 2473-2488, 2490-2492, 2494-2497, 2499, 2501-2523, 2525, 2528-2546, 2548, 2549, 2551-2554, 2556-2564, 2568-2570, 2572-2589, 2591 and 2592 have not been previously described. In addition, the present invention also contemplates mutant MOR proteins, peptide fragments of MOR proteins, truncated MOR, MOR fusion proteins, and obvious variants of these peptides that are within the art to make and use. Fusion proteins may include but are not limited to full length MOR, truncated MOR or peptide fragments of MOR fused to another protein or peptide such as a marker protein. MOR peptides and proteins may be synthesized or produced using recombinant DNA technology well known in the art.

[0048] Another aspect of the present invention relates to antibodies. The polypeptides of the invention or their fragments, or cells expressing them, can be used as immunogens to produce monoclonal or polyclonal antibodies that are specific for polypeptides of the present invention. Antibodies generated against polypeptides of the present invention may be obtained by administering the polypeptides or fragments, or cells expressing them to an animal, preferably a non-human animal, using protocols familiar to one skilled in the art. For preparation of monoclonal antibodies, any technique known to one skilled in the art which provides antibodies produced by continuous cell line cultures can be used.

[0049] The present invention provides for methods for detecting the presence of a MOR nucleic acid molecule, protein or polypeptide in a sample by contacting the sample with an agent capable of detecting a MOR nucleic acid molecule, protein or polypeptide such that the presence of a MOR nucleic acid molecule, protein or polypeptide is detected in the biological sample. The agent may include, but is not limited to, a nucleic acid probe comprising sequences from MOR genes, an antisense molecule, and an antibody.

[0050] The present invention also provides for genetically engineered host cells that contain any of the foregoing MOR sequences operatively linked to a regulatory element that directs the expression of the MOR coding sequences in the host cell.

[0051] The invention also provides a method for producing a MOR protein by culturing in a suitable medium, a host cell of the invention, such that the MOR protein is produced.

[0052] The present invention further provides for transgenic mice or other non-human organism that contain any of the foregoing MOR sequences.

[0053] In a further aspect of the present invention, there is provided a method of screening compounds to identify those that stimulate or inhibit the biological function of the polypeptides of the present invention. In addition, the present invention provides for a method of screening compounds to identify those that regulate the expression level of the polypeptide. Such methods identify agonists or antagonists that may be employed for therapeutic, cosmetic or other purposes.

[0054] The MOR proteins of the present invention can be used to screen a compound for the ability to stimulate or inhibit interaction between the MOR receptors and a target protein that normally interacts with the MOR receptor. The target can be any protein with which the receptor normally interacts, including, but not limited to, extracellular ligands and intracellular signaling proteins. The assay includes the steps of combining the MOR receptor with a candidate compound under conditions that allow the MOR receptor or a fragment of the MOR receptor to interact with the target protein, and to detect the formation of a complex between the MOR receptor and the target or to detect the biochemical consequence of the interaction with the MOR receptor and the target, such as detecting the induction of a reporter gene (comprising a target-responsive regulatory element operatively linked to a nucleic acid encoding a detectable marker, e.g., luciferase or GFP), detecting a cellular response, e.g., development, differentiation or rate of proliferation, and detection of the activation of a substrate, or change in substrate levels.

[0055] For example, agonists or antagonists of the MOR polypeptides may be designed for treatment of mammalian anosmias, i.e., to treat a subject that has lost the ability to smell. The present invention provides for the identification of genes relating to mammalian anosmias and the development of treatments for anosmias. In addition, more effective perfumes may be designed for cosmetic purposes. Agents may be identified from a variety of sources, for example, cells, cell-free preparations, and natural product mixtures derived from microorganisms, plants or animals. The agents may be naturally occurring or synthetic, and may be a single substance or a mixture. Screening may be performed in high throughput format using chemical libraries, combinatorial libraries, expression libraries and the like.

[0056] Compounds useful of the treating anosmias may be identified by using behavioral assays in an anosmic mouse and determining whether the anosmic mouse can detect isovaleric acid at levels below 10⁻⁵M and preferably below 10⁻⁶M. Osmic mice can detect isovaleric acid at 10⁻⁷M. A conditioned avoidance assay can be used, where mice that can smell isovaleric acid are conditioned to associate the smell with an aversive stimulus. (Griff and Reed. “The Genetic Basis for Specific Anosmia to Isovaleric Acid in the Mouse.” Cell 83:407-414 (1995)).

[0057] The present invention provides for methods of screening for ligands of the MOR receptors. In one embodiment of the present invention, identified ligands for MOR receptors can be used to design more efficient compounds for stimulating or inhibiting MOR receptor function.

[0058] Agents which stimulate olfactory receptors can cause an animal to become attracted to a particular substance. Identification of stimulatory agents may allow one to design more efficient compounds for pest control, i.e., rodent attraction to a poisonous substance. This may be selective to pests, i.e. compounds may be chosen that stimulate ORs not found in humans. Furthermore, one may be able to design more appealing fragrances for human use in cosmetics, food, and household products by the identification of compounds that stimulate MORs that have human homologues.

[0059] Agents which stimulate olfactory receptors can also cause an animal to become repelled by a particular substance. These compounds may be used in pesticides or extermination. For example, these agents may be useful to develop “animal friendly” exterminants which simply deter the animal from entering a home or a yard. They may also be used to deter a pet from certain activities. For example, an agent whose odor can be detected by a pet, but not its owner, may be useful to deter the pet from sitting on furniture or scratching furniture without being offensive to the owner. Such agents may also be used in place of a fence to keep a pet in the yard or to keep unwanted pets or pests out of the yard.

[0060] The invention further provides for a method of identifying compounds for treating anosmia comprising introducing a candidate compound to an anosmic animal that is only able to detect isovaleric acid at concentrations higher than 10-5 M, observing the animal for an indication that it detected isovaleric acid through a behavioral assay.

### EXAMPLES

[0061] The invention is further described by the Examples below. These examples describe and demonstrate embodiments within the scope of the present invention. The examples are given solely for the purpose of illustration and are not construed as a limitation of the present invention, as many variations thereof are possible without departing from the spirit and scope of the invention.

### Example 1

### Data Mining

[0062] An exhaustive TBLASTN search incorporating profile HMM (Hidden Markov models) search was used to obtain all the possible OR sequences from the Celera mouse genome using, for example, the data mining method represented by the flow diagram of FIG. 6. Human intact ORs were aligned to build profile HMMs and these models were utilized to search for mouse candidate OR genes. Conceptual translation was used to recover the original ORFs for possible pseudogenes. Duplicates were removed and resulting OR genes were mapped to genomic locations according to the mapping data of the scaffolds by Celera.

[0063] Methods

[0064] Profile HMM Classifier

[0065] Referring to FIG. 7a, all intact human OR protein sequences from the HORDE database (http://bioinformatics.weizmann.ac.il/HORDE) were aligned using ClustalW, and the alignments were used to build two profile HMMs (one for 49 Class I ORs 4c, the other for 273 Class II ORs 4c′) using the HMMER software package (http://hmmer.wustl.edu/). New query sequences were compared with both models. As shown in FIG. 7a, the output E-values and the log likelihood ratio (logloEr/Erv) were used to classify the query sequences as OR/non-OR (one of the E-values must be less than 1-1°), and to further classify into classes if they are ORs (log likelihood ratio>10, Class II; <10, Class I; otherwise uncertain). Cross-validation experiments showed that models based on a 40-sequence training set could predict ORs and OR classes with high specificity and sensitivity for both full-length and fragmental ORs. Using a HMM classifier allows for the coupling of a low-stringency TBLASTN search to get a large number of hits, then choose the candidate ORs by comparing them to the profile HMMs. This is more powerful than previously known methods because a greater number of candidate sequences is created, which improves the chances of finding more genes within the family.

[0066] Data Mining in the Mouse Genome

[0067] Referring to FIG. 7b, representative human OR sequences 1a (which generally have <40% pairwise protein identity) and mouse OR sequences 2a were used as query sequences for a TBLASTN search 6a in the Celera mouse genome. All hits with an E-value <10 were collected. For each hit, a 4-Kb genomic region covering the hit position was used to search for the longest ORF 8a in that region. The translated protein sequences from these ORFs were then sent to the profile HMM classifier 9a to obtain the E-values and log likelihood ratio. These sequences were also subjected to a BLASTP search against two databases: the mammalian OR database (including all the known human and rodent ORs) and a non-OR GPCR (−400 genes) database. The results from both the profile HMM classifier and the BLASTP search were used to classify a query as OR or non-OR. In total, 1,405 potential OR sequences were found. All steps, except the TBLASTN search, were automated by scripts written in MATLAB (the MathWorks, Inc., Natick, Mass.).

[0068] Selection of Full-Length ORs.

[0069] The secondary structures of all potential ORs longer than 275 amino acids were obtained (from the TMHMM server http://www.cbs.dtu.dk/services/TMHMM-2.0/ or the PredictProtein server http://cubic.bioc.columbia.edu/predictprotein/, or by alignment to other ORs with secondary structure already predicted). If a potential OR had 7 transmembrane domains and the N and C terminals had the appropriate length (N 10-40 aa, C 7-30 aa), it was treated as a full-length mouse OR and was added into the mouse OR database directly. By these criteria, 759 full-length mouse ORs were discovered out of the 1,405 sequences (4 were removed later as duplicates).

[0070] Conceptual Translation.

[0071] All other sequences (including 199 with terminals that were too long or short, and 447 consisting of only a short fragment) were subjected to conceptual translation using FASTY (http://http.virginia.edu/pub/fasta/). FASTY aligns the query DNA sequence with a specified protein database considering possible frame shifts and premature stop codons. The full-length OR protein database used by FASTY includes 347 intact human ORs and the 755 full-length mouse ORs previously identified. The resulting conceptual translation was based on the best hit, but extended at both ends according to the top 20 FASTY hits. This method also ensures that the best translation starting points were chosen for ORs with multiple methionines in the N terminus. From conceptual translation, an additional 129 full-length intact ORs were discovered from the 199 ORs that previously had terminals considered either too long or too short. For these ORs, either the best translation starting points were determined by conceptual translation or the conceptual translation result was the same as the longest ORF. An additional 157 full-length sequences (with disruptions) were generated from what had been previously considered fragments.

[0072] Removing Duplicates.

[0073] Even after conceptual translation, there were still some short fragments of OR sequences. These could be classified into two groups: fragments reaching the ends of short scaffolds or reaching the end of low-quality sequence regions (long stretches of ‘N’s) in large scaffolds (229 sequences), and short fragments not reaching any kind of ends in large scaffolds (61 sequences). Fragments in the first group might become full-length genes when more sequence information becomes available, whereas fragments in the second group were considered as pseudogenes with large deletions. For both groups, assuming the fragment was not mapped, if it could be matched to another longer mouse OR with >95% identity and the flanking DNA regions were almost identical, it was removed as a duplicate. Some full-length ORs were also removed because they were found on very short unmapped scaffolds (<<3 Kb) and they shared more than 98% identity with another full-length OR found on a longer mapped scaffold. It should be noted that all the ORs that were removed as duplicates need to be confirmed by future mapping data. Accordingly, all unmapped ORs that were removed as duplicates have been noted, and their final accurate mapping information will be used to determine if they truly are duplicates. In the rare cases where two fragments had an almost identical overlapping region both at the protein and DNA level, a long DNA sequence was assembled from the two short DNA sequences and conceptual translation was used to generate a long protein sequence. Eleven full-length sequences were generated this way. Finally, 1,296 non-duplicate sequences were obtained from a total of 1,405 sequences. Of these 1,296 sequences, 154 are fragments and 58 of those are pseudogenes with large deletions.

### Example 2

### Matches with known ORs

[0074] 122 mouse ORs were collected from the ORDB, and 362 mouse ORs were collected from Genbank using ‘olfactory receptors’ or ‘odorant receptors’ as a keyword when searching mouse genes (all databases as of Jun. 25, 2001). The ORs from the public database were matched with our mouse OR database using FASTA3. For each OR from the public database the best hit was chosen, and the percentage of protein identity was used for further analysis. Similarly, human ORs and rat ORs were also matched with our mouse OR database.

### Example 3

### Matches with ORs from cDNA Sources and the Mouse EST Database

[0075] ORs labeled as originating from cDNA source material in the ORDB were selected, and each of these sequences was searched against our mouse OR database. Hits with >95% identity were considered as matches. The mouse EST database was downloaded from the NCBI server and BLASTN search was performed using every mouse OR DNA sequence as a query against the EST database. Hits with E-values <1e-100 were considered as matches.

### Example 4

### Identification of Mouse Olfactory Receptor Gene Family

[0076] 1296 genes have been identified as set forth in SEQ ID NOS: 1-1296. This is by far the largest gene superfamily in the mammalian genome. About 80% (˜1000) of the ORs are potentially functional genes and 20% appear to be pseudogenes. Of the 1296 genes, 96 are partial sequences due to the current incompleteness of the Celera sequencing effort. This large number of ORs corresponds to previous predictions based on the number of glomeruli (i.e. sensory neuron targets) and from screening genomic phage libraries (Mombaerts, P. Molecular biology of odorant receptors in vertebrates. Annu Rev Neurosci 22, 487-509 (1999)). Proteins encoded by the identified MOR genes are as set forth by SEQ ID NOS: 1297-2592 in the attached sequence listing.

[0077] The Celera Mouse Genome claims greater than 99% coverage, but there are many low quality sequence regions (long stretches of ambiguous nucleotides), especially in long scaffolds. It remains possible that there are undiscovered OR sequences in these low quality sequence regions, as well as in remaining gaps. To determine how much of the mouse OR repertoire was covered, ORs accessible in public databases with the OR repertoire of the present invention. Over 90% of the mouse ORs in current public databases can be found in the OR repertoire of the present invention (Table 1). It should be noted, however, that some of the OR sequences in the public database could be PCR artifacts, i.e. “chimera receptors” due to recombination among highly related sequences, a phenomenon that has been documented (Glusman, G., Clifton, S., Roe, B. & Lancet, D. Sequence analysis in the olfactory receptor gene cluster on human chromosome 17: recombinatorial events affecting receptor diversity. Genomics 37, 147-60. (1996)). Newly identified nucleotide sequences are set forth by SEQ ID NOS: 4-6, 8, 12-14, 16-27, 30-50, 52, 53, 55-69, 72-86, 88-92, 97-100, 102-121, 123, 125, 127-144, 146-152, 154-164, 167, 168, 171-173, 175-182, 184-191, 193, 194, 196-205, 207, 209-214, 216-219, 221-225, 227-245, 250-252, 254, 256-260, 264-270, 273-281, 285-292, 294, 296-300, 303, 304, 306-313, 315-318, 320, 322-329, 331-335, 339-352, 354, 355, 357-388, 391, 393-426, 428, 429, 432-468, 470-486, 488-495, 497-507, 509-513, 515-525, 527, 528, 532, 533, 535, 538, 540-542, 545-556, 558-563, 565-576, 578-597, 599-618, 620, 624-628, 630, 631, 637-656, 659-662, 665, 667-675, 677-683, 685-697, 701, 704-716, 719-738, 740-757, 759-766, 768-784, 786, 789-796, 800, 801, 803-812, 814-834, 836-865, 867-926, 928-1060, 1062-1094, 1096-1115, 1117-1126, 1129-1135, 1138-1144, 1146-1156, 1159-1165, 1168-1171, 1173-1175, 1177-1192, 1194-1196, 1198-1201, 1203, 1205-1227, 1229, 1232-1250, 1252, 1253, 1255-1258, 1260-1268, 1270-1272, 1274-1293, 1295 and 1296 in the attached sequence listing. Proteins encoded by the above-identified new sequences are set forth as SEQ ID NOS: 1300-1302, 1302, 1308-1310, 1312-1323, 1326-1346, 1348, 1349, 1351-1365, 1368-1382, 1384-1388, 1393-1396, 1398-1417, 1419, 1421, 1423-1440, 1442-1448, 1450-1460, 1463, 1464, 1467-1469, 1471-1478, 1480-1487, 1489, 1490, 1492-1501, 1503, 1505-1510, 1512-1515, 1517-1521, 1523-1541, 1546-1548, 1550, 1552-1556, 1560-1566, 1569-1577, 1581-1588, 1590, 1592-1596, 1599, 1600, 1602-1609, 1611-1614, 1616, 1618-1625, 1627-1631, 1635-1648, 1650, 1651, 1653-1684, 1687, 1689-1722, 1724, 1725, 1728-1764, 1766-1782, 1784-1791, 1793-1803, 1805-1809, 1811-1821, 1823, 1824, 1828, 1829, 1831, 1834, 1836-1838, 1841-1852, 1854-1859, 1861-1872, 1874-1893, 1895-1914, 1916, 1920-1924, 1926, 1927, 1933-1952, 1955-1958, 1961, 1963-1971, 1973-1979, 1981-1993, 1997, 2000-2012, 2015-2034, 2036-2053, 2055-2062, 2064-2080, 2082, 2085-2092, 2096, 2097, 2099-2108, 2110-2130, 2132-2161, 2163-2222, 2224-2356, 2358-2390, 2392-2411, 2413-2422, 2425-2431, 2434-2440, 2442-2452, 2455-2461, 2464-2467, 2469-2471, 2473-2488, 2490-2492, 2494-2497, 2499, 2501-2523, 2525, 2528-2546, 2548, 2549, 2551-2554, 2556-2564, 2568-2570, 2572-2589, 2591 and 2592, respectively.

[0078] In addition, a few examples of non-OR sequences improperly labeled as ORs in the public database were found. In ORDB, the genes ORL248, ORL834, ORL844, ORL837 are not likely to be ORs (Skoufos, E. et al. Olfactory Receptor Database: a database of the largest eukaryotic gene family. Nucleic Acids Res 27, 343-5 (1999)). When compared to profile HMMs trained on human intact ORs they have large E-values (>30), while typical ORs have E-values <1-10. The OR repertoire of the present invention is believed to cover more than 90% of the whole mouse OR repertoire.

[0079] As a caveat, it should be noted that different mouse strains are known to have slightly different sequences for the same OR. The Celera mouse genome was assembled from four different strains (129X1/SvJ, 129S1/SvImJ, DBA/2J, and A/J). ORs in the assembled genome represent the consensus of the strains that had sequence available for that region. The real OR sequences in each strain might be slightly different, but generally should be >99% identical to the sequence in the current database. All of the sequences of the present invention were less than 98% identical with each other except in a very few cases where two very similar genes were unambiguously located at different genomic locations.

TABLE 1
Comparison of genome derived database with available mouse ORs
in public database.

| Database | ORs from Genbank | ORs from ORDB |
|---|---|---|
| Number of ORs | 362 | 122 |
| Matches (>95% identity) | 327 (90.3%) | 110 (90.2%) |
| Matches (>95% identity) | 280 (77.3%) | 93 (76.2%) |

### Example 5

### Phylogenetic Analysis of the OR Sequences

[0080] The 1296 mouse OR genes were aligned using ClustalX 1.81, which provides a graphical interface for the ClustalW multiple sequence alignment program. The resulting multiple alignment were used as input to phylogenetic analysis software program, PAUP*4.0 beta (Phylogenetic Analysis Using Parsimony) (Sinauer Associates, Inc., Sunderland, Mass.). The majority-rule consensus Neighbor Joining (NJ) tree from 1000 bootstraps was obtained from PAUP* requiring 48 hours running time on a 1 GHz Pentium III PC. Bootstrap methods of statistical analysis uses simulation to calculate standard errors, confidence intervals and significance tests. In this scenario, bootstrap is used to determine if a tree branch, or a cluster of genes, form a significant cluster. The tree comprises various clades, phylogenetic groups with shared characteristics and stemming from a common ancestor. OR families were determined from the largest clades that fulfilled two criteria: the clade had greater than 50% bootstrap support, and all members within that clade had at least 40% protein identity. In order to show a simplified tree, another tree with the consensus sequences of each family was built. Only intact full-length ORs from each family were used to generate the consensus sequence. The sequences from each family were aligned using ClustalW, after which a profile HMM was built upon the alignment, and the consensus sequence was generated from the profile HMM using the HMMER package. The ORs from families with only a single gene were used directly. All the consensus sequences were aligned and a NJ tree with 1000 bootstraps was built using ClustalX. The tree was rooted using human and mouse melanocyte stimulating hormone receptors (MSH-R), one of the GPCRs most closely related to ORs. The tree was plotted using Tree Explorer (http://evolgen.biol.metro-u.ac.jp/TE/TE_man.html).

[0081] The same method was used to obtain human consensus sequences and to build a combined tree of all human and mouse OR families. The tree was unrooted and plotted using Tree Explorer. Selected ORs from human and mouse, examples of which are illustrated in FIG. 5b, FIG. 5c, were aligned and NJ trees with 1000 bootstraps were built using ClustalX.

[0082] Based on the consensus tree, the ORs were classified into families using a rule whereby all family members must comprise a strong phylogenetic cluster, i.e., a reliable clade, generally possessing >50% bootstrap support, and should have more than 40% protein identity. By this definition mouse ORs could be classified into 228 families containing from 1 to 50 member genes. Since the complete tree of 1296 ORs cannot be clearly shown on one page, a phylogenetic tree using the consensus sequence for each family was built, as shown in FIG. 1a. FIG. 1a shows a phylogenetic tree of the consensus sequences of mouse OR families. The bootstrap values are shown at nodes with >50% support. The tree was rooted using human and mouse melanocyte stimulating hormone receptors (MSH-R). The OR sequences clearly separate into two broad classes, each with excellent bootstrap support. This is the same Class I and Class II distinction as reported previously for the human OR sequences (Glusman, G., Yanai, I., Rubin, I. & Lancet, D., “The complete human olfactory subgenome,” Genome Res 11, pp. 685-702 (2001)).

[0083] A classification for the mouse OR families was developed by the present invention, based on the phylogenetic tree, in which Class I OR families were given family numbers lower than 100 (currently 1-42), while Class II OR families were given family numbers higher than 100 (currently 101-286). If new families are discovered they can be given family numbers following the same rule. The number of genes in each family is shown in FIG. 1b. FIG. 1b depicts graphically Class I and Class II OR families, their respective family members, and the number of genes in each family.

[0084] The following nomenclature system for the mouse OR genes was used in the present invention: ‘MOR’ is used as a prefix, followed by the family name (Arabic number: 1-42, 101-286, as above), then a dash (-) followed by a number representing the individual gene within the family. The letter ‘P’ at the end of the name denotes that gene as possibly a pseudogene (see below for discussion on determining pseudogenes). For example, MOR1-1 is an intact family 1 OR belonging to Class I because the family number is less than 100; MOR185-9P is a pseudogene in family 185, which is a Class II family.

[0085] There are two existing nomenclature systems for human ORs. Lancet and colleagues proposed naming OR genes according to family (>40% amino acid identity) and subfamily (>60%) assignments (Glusman, G. et al., “The olfactory receptor gene superfamily: data mining, classification, and nomenclature,” Mamm Genome 11, pp. 1016-23 (2000)). Zozulya and colleagues introduced an alternative naming scheme mainly based on phylogenetic analysis, but also accounting for genomic location (Zozulya, S., Echeverri, F. & Nguyen, T., “The human olfactory receptor repertoire,” Genome Biol 2, pp. 0018.1-12 (2001)). The proposed nomenclature used herein is more similar to the second system, except genomic locations were not included.

### Example 6

### Pseudogenes

[0086] Of the 1296 OR genes, a significant number that had one or more disruptions in the coding region was identified, where a disruption could be an insertion, a deletion, a frame shift or a premature stop codon. However, all genes with disruptions are pseudogenes as some of the disruptions may be due to errors in the genomic sequences. There are examples of OR sequences that are known to be functionally expressed, but have disruptions in the Celera genome sequences. Besides possible sequencing errors, there are also polymorphisms in which one OR gene might have disruptions in some individuals, but are intact in others. (Glusman, G. et al. “Sequence, structure, and evolution of a complete human olfactory receptor gene cluster,” Genomics 63, pp. 227-45. (2000); Ehlers, A. et al. “MHC-linked olfactory receptor loci exhibit polymorphism and contribute to extended HLA/OR-haplotypes,” Genome Res 10, pp.1968-78. (2000); Younger, R. M. et al. “Characterization of clustered MHC-linked olfactory receptor genes in human and mouse,” Genome Res 11, pp. 519-30. (2001)).

[0087] In order to guide the estimation of pseudogenes, the available expression data for mouse ORs was obtained and compared to the OR database of the present invention, to the Olfactory Receptor Database (ORDB) (a world-wide web-accessible database that stores data on Olfactory Receptor-like molecules containing 96 mouse ORs from cDNA sources http://crepe.med.yale.edu/ORDB/HTML), and to the mouse EST database (NCBI). In total 174 ORs with at least one match to cDNA or EST sequences, suggesting functional expression. The percentage of expressed ORs was similar for genes with no disruptions and with one disruption (14% & 15% respectively), but this percentage dropped by almost half for ORs with two or more disruptions (8-10%), as indicated in Table 2a herein below. From this observation, it was estimated that many ORs with one disruption could be functional. On the other hand, ORs that have an intact reading frame could be pseudogenes if they lack important functional regions. Therefore ORs with zero or one disruption were checked for the presence of the conserved motifs found in all mammalian ORs (Mombaerts, P. “Molecular biology of odorant receptors in vertebrates,” Annu Rev Neurosci 22, pp.487-509 (1999)). Six ORs lacked one or more of these motifs and were therefore classified as pseudogenes. Accordingly in the nomenclature system used herein, full length ORs with two or more disruptions, partial length ORs with one or more disruptions, and ORs with less than one disruption, but missing conserved motifs, were labeled as pseudogenes as indicated in Table 2a herein below. Using this calculation, 260 of the 1296 ORs in mouse (20%) were classified as pseudogenes. If a more conservative approach was taken and only full-length genes with no disruptions were considered as functional genes, there would be only 873 functional genes, and 423 (33%) pseudogenes.

[0088] Since less than 10 pseudogenes have been previously reported in mouse (Xie, S. Y., Feinstein, P. & Mombaerts, P. “Characterization of a cluster comprising approximately 100 odorant receptor genes in mouse,” Mamm Genome 11, pp.1070-8 (2000); Lapidot, M. et al. “Mouse-Human Orthology Relationships in an Olfactory Receptor Gene Cluster,” Genomics 71, pp.296-306 (2001)), it was not expected that such a large portion of identified MOR genes would be pseudogenes. This 20% may be attributable to two factors. First, most OR sequences have been obtained from cDNA, which would miss untranscribed genes, and second, the common practice of using degenerate PCR for obtaining OR partial sequences would miss disruptions outside of the PCR-amplified region. In any case, the clearly large number of pseudogenes suggests that the OR superfamily undergoes rapid evolution, with new genes continuously being generated by duplication and mutation. For mouse ORs, it is expected that something less than the ˜1000 apparently intact genes may be functional in any individual animal. From limited data it appears that on average the cells expressing a given receptor target two glomeruli in the mouse olfactory bulb. Counting glomerular targets (˜1800) and dividing by 2 gives a rough estimate of 900 functional genes. (Mombaerts, P. “Molecular biology of odorant receptors in vertebrates,” Annu Rev Neurosci 22, pp.487-509 (1999)).

TABLE 2a
ORs with at least one match for expression data (from EST database or
a cDNA source).

No. of disruptions.

| | 0 | 1 | 2 | >2 |
|---|---|---|---|---|
| Total ORs | 904 | 177 | 70 | 145 |
| ORs with match | 128 | 27 | 7 | 12 |
| (ORs w/match)/total | 14% | 15% | 10% | 8.3% |

[0089] TABLE 2b
Number of intact genes and pseudogenes from each group of ORs
according to the length and number of disruptions.

| | | | | Full | | | Partial |
|---|---|---|---|---|---|---|---|
| | | Full | Full | length, | Partial | Partial | length, |
| | | length, | length, | 2 or | length, | length, | 2 or |
| | | no | 1 | more | no | 1 | more |
| | Total | dsrpt. | disrpt. | disrpt. | dsrpt. | disrpt. | disrpt. |
| All OR | 1296 | 875 | 138 | 129 | 29 | 39 | 86 |
| genes | | | | | | | |
| Intact | 1036 | 873 | 134 | 0 | 29 | 0 | 0 |
| genes | | | | | | | |
| Pseudo- | 260 | 2* | 4* | 129 | 0 | 39 | 86 |
| genes | | | | | | | |

*These ORs were labeled as pseudogenes because they lacked one or more of the OR signature sequences.

### Example 7

### Genomic Distribution of MOR genes

[0090] OR genes were distributed mainly in clusters on all mouse chromosomes except 12 and Y. Out of the 1296 ORs, 1103 were mapped to 18 chromosomes (the rest were on currently unmapped sequence regions), as shown in FIGS. 2a and 2b. FIGS. 2a and 2b show the chromosomal distribution of Mouse OR Genes. In FIG. 2a, mouse chromosomes are drawn according to the Celera scaffold assembly. Scaffolds with unknown directions are in gray. The cytogenetic map of each chromosome is shown under the scaffold assembly in scale (from Animal Genome Database, http://ws4.niai.affrc.go.jp/dbsearch2/mmap/mmap.html). The number of ORs per 500 Kb are depicted as bars on each chromosome. OR clusters are indicated by arrow heads. Arrows indicate isolated single genes on the chromosomes that are not easily visualized. Scaffolds on chromosome Y are not yet mapped in the Celera mouse genome, but based on results from human and other species, it is unlikely that there will be ORs on chromosome Y.

[0091] Chromosome 7 housed the largest number of ORs (252), while chromosome 11 (190 ORs) and chromosome 9 (131 ORs) were the second and the third most populous. In contrast, chromosomes 3 and 8 had only 2 ORs apiece, and chromosome X had only 4 ORs (FIG. 2b). The graph in FIG. 2b shows the number of intact genes (dark) and pseudogenes (shaded) on each chromosome. UM (‘UnMapped’) represents ORs from currently unmapped scaffolds.

[0092] Gene clusters were determined using the same definition as in the human OR genome: clusters contain more than 5 genes, none of which are separated by more than 1 Mb. Twenty-seven mouse OR clusters were identified, including two on currently unmapped scaffolds which could turn out to be part of existing clusters, which contain a total of 1130 OR genes, as shown on FIG. 3. The frequency of ORs in these clusters was high, ranging from 18 to 66 Kb per OR (average=29 Kb per OR). OR clusters were named by their chromosome number (1-19, and UM for “UnMapped”), and the index number of the cluster on its chromosome. Interestingly, ORs from the same family tended to locate near each other, forming ‘subclusters’. There were some ORs not located in any of the clusters; however, they still tended to locate as “miniclusters” (i.e., they consist of fewer than 5 genes together), e.g., ORs on chromosome 18 shown in FIG. 2a. Isolated single ORs were rarely seen; however, one was located in the middle of chromosome X.

[0093] In spite of the density of OR genes, non-OR genes were regularly found within the OR clusters. Only 5 small OR clusters (1-1,4-1, 4-2, 7-1, UM-1) were completely free of non-OR genes; all other clusters had some non-OR genes distributed within them. Interestingly, viral coat proteins (Gag, ENV, and Pol polyproteins) were often found in OR clusters. Notably, the retrovirus-related Gag or Gag-related proteins could be found in 15 out of the 27 OR clusters, presented in one to eight copies. The density of Gag or Gag-related proteins was twice as high in OR clusters than in the rest of the genome. The presence of viral coat proteins in OR clusters suggests a possible viral-based mechanism of gene duplication and relocation. ORs, like many mammalian GPCRs, are generally intronless, and one theory attributes this to a retroviral mediated duplication of the family (Brosius, J. “Many G-protein-coupled receptors are encoded by retrogenes,” Trends Genet 15, pp.304-5. (1999); Gentles, A. J. & Karlin, S. “Why are human G-protein-coupled receptors predominantly intronless?” Trends Genet 15, pp. 47-9. (1999)).

[0094] The present invention is useful to address whether if phylogenetically related ORs are also located close to one another. To determine this, OR pairs that were at least 60% identical at the protein level were identified and their relative chromosomal locations were determined. It was found that 1176 ORs had another OR at least 60% identical to it, but because 239 of these pairs had at least one OR not mapped to a chromosome location, only the remaining 937 were analyzed. In 918 (98.0%) of these 937 cases, the two ORs were located on the same chromosome within a median distance of 44 Kb. In 55.3% (518/937) cases, the two ORs were either adjacent to each other, or were separated by only one other OR. The close proximity of highly related ORs suggests significant local duplication as another mechanism of OR family expansion, in addition to large scale duplication of OR clusters.

[0095] A few mouse OR loci have been genetically mapped to chromosomal locations (Copeland, N. G. et al. “A genetic linkage map of the mouse: current applications and future prospects,” Science 262, pp. 57-66. (1993); Sullivan, S. L., Adamson, M. C., Ressler, K. J., Kozak, C. A. & Buck, L. B. “The chromosomal distribution of mouse odorant receptor genes,” Proc Natl Acad Sci USA 93, pp. 884-8 (1996); Carver, E. A., Issel-Tarver, L., Rine, J., Olsen, A. S. & Stubbs, L. “Location of mouse and human genes corresponding to conserved canine olfactory receptor gene subfamilies,” Mamm Genome 9, pp. 349-54. (1998); Strotmann, J. et al. “Small subfamily of olfactory receptor genes: structural features, expression pattern and genomic organization,” Gene 236, pp. 281-91. (1999); Asai, H. et al. “Genomic structure and transcription of a murine odorant receptor gene: differential initiation of transcription in the olfactory and testicular cells,” Biochem Biophys Res Commun 221, pp. 240-7. (1996); Bulger, M. et al. “Conservation of sequence and structure flanking the mouse and human beta-globin loci: the beta-globin genes are embedded within an array of odorant receptor genes,” Proc Natl Acad Sci USA 96, pp. 5129-34. (1999); Zheng, C., Feinstein, P., Bozza, T., Rodriguez, I. & Mombaerts, P. “Peripheral olfactory projections are differentially affected in mice deficient in a cyclic nucleotide-gated channel subunit,” Neuron 26, pp. 81-91. (2000)). These loci were matched to the OR database of the present invention using either their OR sequences or molecular marker sequences. The same chromosome locations were found for all of the known mouse OR loci except for olfr4. FIG. 3 shows a schematic diagram demonstrating the distribution of OR Clusters. Detailed distribution of ORs in each of the 27 clusters are shown. Intact genes are labeled as ‘x’, and pseudogenes are labeled as ‘+’. It can be seen that similar ORs tend to locate together, forming patches in the figure. All the Class I ORs are located in cluster 7-3. Most families are located in a restricted area in one cluster.

[0096] Although only one or a few ORs were previously known for each locus, they are now mapped to OR clusters with dozens of ORs. Not surprisingly, it quite often happened that multiple known loci actually mapped to different locations within the same cluster.

[0097] Two OR clusters have recently been studied in detail. Eighteen mouse OR genes were found in olfr17, which matches to one subcluster (87.5M to 87.9M) of 25 ORs (SEQ ID NOS: 65, 93-96, 356, 536-544, 758, 828, 866, 867, 937, 1127, 1128, 1238) in cluster 7-3 (Lane, R. P. et al. “Genomic analysis of orthologous mouse and human olfactory receptor loci,” Proc Natl Acad Sci USA 98, pp. 7390-5. (2001)). Forty-two ORs have been identified in olfr7, and the total number of ORs in this cluster was estimated to be around 100 (Xie, S. Y., Feinstein, P. & Mombaerts, P. “Characterization of a cluster comprising approximately 100 odorant receptor genes in mouse,” Mamm Genome 11, pp. 1070-8 (2000)). This group matches to cluster 9-2 in the ORDB of the present invention. In fact, this cluster has 113 ORs.

[0098] Olfr4 was previously mapped to chromosome 2 and has three known genes. However, one gene mapped to cluster 11-2 and two genes to an unmapped scaffold, UM-2 that was also likely to be on chromosome 11. This discrepancy of the location of olfr4 may require additional data to be resolved.

### Example 8

### Candidate OR Cluster for a Specific Anosmia to Isovaleric Acid

[0099] Several naturally occurring specific anosmias (the inability to detect an odor) have been reported in human and mouse (Griff, I. C. & Reed, R. R. “The genetic basis for specific anosmia to isovaleric acid in the mouse,” Cell 83, pp. 407-14. (1995)). C57BL/6J and C57BL/10J mice have a specific anosmia (or more precisely, a narrowly limited hyposmia) to isovaleric acid, and this defect appears to have a peripheral source (Wysocki, C. J., Whitney, G. & Tucker, D. “Specific anosmia in the laboratory mouse,” Behav Genet 7, pp. 171-88. (1977); Wang, H. W., Wysocki, C. J. & Gold, G. H. “Induction of olfactory receptor sensitivity in mice,” Science 260, pp. 998-1000. (1993)). This anosmia is recessive and two loci responsible for the defect have been mapped, Iva1 on chromosome 4, and Iva2 on chromosome 6 (Griff, I. C. & Reed, R. R. “The genetic basis for specific anosmia to isovaleric acid in the mouse,” Cell 83, pp. 407-14. (1995)). Based on the adjacent molecular markers, the present invention has located Iva1 at 110.46M-112.23M on the reference axis of chromosome 4, a location that matches very well with OR cluster 4-2 (111.96M-112.29M on chromosome 4). The 14 ORs (SEQ ID NOS: 279, 280, 425, 426, 740, 792, 850, 853, 887, 888, 1159, 1193, 1203, and 1212) in this cluster were from families 258 and 259, two closely related families that form a clade with 97% bootstrap support value. Two other unmapped ORs (SEQ ID NOS: 1164 and 1107) also belong to these two families. Because highly related sequences were usually located near each other, it was likely that the two unmapped ORs probably were also part of cluster 4-2. No other ORs from any other position fell into these two families. Thus, the 16 genes in families 258 and 259 may be considered Iva1 ORs. The other locus, Iva2, was mapped to 136.1M to 140.9M of chromosome 6, but no OR sequences were found in this region. There is a sequence gap in the Celera mouse genome in this region, so it remains possible there are ORs in this gap. However, considering its weak correlation with the anosmia, and the fact that one of the markers (D6MIT201) used to located Iva2 actually maps to the Iva1 locus in the Celera mouse genome, Iva2 is not likely to be the true locus for isovaleric acid anosmia. The most likely cause of the anosmia in C57BL/6J and C57BL/10J mice would appear to be the loss of OR proteins in cluster 4-2. Since the strains used in Celera mouse genome database are osmic animals, the Iva1 locus of the anosmic strains may be useful to determine the cause underlying the loss of these OR proteins.

[0100] This result also suggests that some or all the Iva1 ORs bind isovaleric acid with high affinity. Anosmic strains of mice respond to isovaleric acid at a higher threshold than mice in osmic strains, suggesting that the defect involves a loss of high affinity receptors (Wang, H. W., Wysocki, C. J. & Gold, G. H. Induction of olfactory receptor sensitivity in mice. Science 260, 998-1000. (1993)). Of the 16 Iva1 OR genes, 6 intact genes were in family 258 sharing 50-80% protein identity, and 7 intact genes plus 3 pseudogenes were in family 259, sharing 80-95% protein identity. Genes from the two families shared 35-50% protein identity, suggesting they may have different ligand binding profiles. Functional studies of these two families may reveal which family, or which ORs, are responsible for recognizing isovaleric acid at high affinity.

[0101] Interestingly, when the Iva1 ORs were compared with human ORs, no intact human OR fell into the same clade as the Iva1 ORs (FIG. 5c). At least from the available human data, no orthologs of Iva1 ORs are present in humans, which suggests that humans lack the high affinity receptors for isovaleric acid. In animal behavior assays in which isovaleric acid was diluted in buffered solution adjusted to its pH, anosmic animals could detect isovaleric acid only at concentrations higher than 10⁻⁵ M, while osmic strains were sensitive to isovaleric acid at concentrations as low as 10⁻⁷ M (Griff, I. C. & Reed, R. R., “The genetic basis for specific anosmia to isovaleric acid in the mouse,” Cell 83, pp. 407-14. (1995)). According to Flavor-Base Pro (Leffingwell & Associates, Canton, Ga.), the human flavor threshold for isovaleric acid in water is 120-700 ppb, which is equivalent to 1.2-6×10⁻⁶ M, a number between the thresholds of anosmic and osmic mice. Strictly controlled experiments under the same conditions as those used in animal assays would be required to determine the precise human threshold for isovaleric acid.

### Example 9

### Class I ORs

[0102] Class I ORs were first identified in fish and they separate clearly in the phylogenetic tree from the classical, mammalian specific Class II ORs (Ngai, J., Dowling, M. M., Buck, L., Axel, R. & Chess, A., “The family of genes encoding odorant receptors in the channel catfish,” Cell 72, pp. 657-66. (1993)). There were 147 of the ‘Fish-like’ Class I ORs in the mouse OR subgenome, and 120 of them were potentially functional, as indicated in FIGS. 1a and 1b. All of the Class I ORs were located in a single huge cluster on chromosome 7 (cluster 7-3, shown in FIG. 3). This confirms that Class I ORs are prevalent in the mammalian genome, and suggests that they may play important roles in mammalian olfaction.

[0103] Interestingly, 11 of the 14 ORs identified in a recent study as having aliphatic odor ligands belong to Class I. (Malnic, B., Hirono, J., Sato, T. & Buck, L. B., “Combinatorial receptor codes for odors,” Cell 96, pp. 713-23. (1999)). In that study, odorant compounds were applied to dissociated olfactory neurons plated on coverslips, and responses were monitored by calcium imaging. The large portion of Class I ORs found in this study is unusual (11/14 compared to their 12% occurrence in the whole OR repertoire), suggesting that the experimental design or the compounds used in the study may favor activating olfactory neurons expressing Class I ORs. The former can be eliminated since similar experiments using different odorant compounds did not isolate a large proportion of Class I ORs (Touhara, K. et al., “Functional identification and reconstitution of an odorant receptor in single olfactory neurons,” Proc Natl Acad Sci USA 96, pp. 4040-5. (1999); Kajiya, K. et al., “Molecular Bases of Odor Discrimination: Reconstitution of Olfactory Receptors that Recognize Overlapping Sets of Odorants,” J Neurosci 21, pp. 6018-25. (2001)). Therefore it seems likely that the aliphatic compounds used in this study were mostly Class I OR specific ligands. It is worth noting that these compounds were acids and alcohols, which are relatively hydrophilic compared to many other odorant compounds.

[0104] Class I ORs are related to Fish ORs, which are expected to bind water-soluble compounds. In frog Class I ORs are activated by water-soluble odorants, whereas Class II ORs are activated by volatile compounds. (Mezler, M., Fleischer, J. & Breer, H., “Characteristic features and ligand specificity of the two olfactory receptor classes from Xenopus laevis,” J Exp Biol 204, pp. 2987-97. (2001)). In mammals, however, water-soluble compounds generally are not strong odorants, and mammalian Class I ORs diverge significantly from the fish ORs or frog Class I ORs. Class I ORs in mammals may have evolved to recognize volatile compounds, although they are still more sensitive to relatively hydrophilic compounds, while Class II ORs may favor more hydrophobic compounds.

### Example 10

### Global View of Sequences of ORs

[0105] Clustal X 1.81 was used for multiple alignments of full length intact Class I ORs and Class II ORs. The alignments were manually edited. Gap positions present in more than 98% of the sequences were deleted. These gap positions are deleted because they are in only present in a very small portion of the genes and they are not characteristic of the whole family. Sequence logos were generated using a known web-based program developed by Jan Gorodkin (www.cbs.dtu.dk/gorodkin/appl/plogo/html). Sequence logos are a method of displaying consensus sequences that reflect the relative frequency of the bases and information content at various positions along a sequence. (J. Gorodkin, L. J. Heyer, S. Brunak and G. D. Stormo., Comput. Appl. Biosci., Vol. 13, No. 6 pp. 583-586, 1997, and T. D. Schneider and R. M. Stephens., “Sequence logos: a new way to display consensus sequences,” Nucleic Acids Research, Vol. 18, No. 20, pp. 6097-6100, 1990). The sequence, or structure, logo comprises a sequence part and a structure/basepair part. The height of the sequence information part reflects the relative entropy between the observed fractions of a given symbol and the respective a priori probabilities, where the constraint that the a priori “probability” of the gap always is one. The a priori probabilities for amino acids sum to one. If sufficiently multiple gaps are present at a given position, negative “information” may occur. The height of each symbol can be displayed to demonstrate that it is proportional to its frequency, or that the height is in proportion to the fraction of the observed frequency and the expected (a priori) frequency. When an amino acid appears less than expected, it appears displayed upside-down.

[0106] The secondary structure prediction was based on the PredictProtein Server results on consensus sequences generated by the HMMER package.

[0107] ‘Logo’ views of OR sequences of the two Classes have been generated in order to facilitate visual sequence comparisons, as shown in FIG. 4. Predicted transmembrane (TM), intracellular (IC), and extracellular (EC) regions are depicted on FIG. 4. The very terminal sequences are removed to avoid length heterogeneity and no significant sequence conservation was found in these regions. The height of each amino acid is proportional to its frequency of occurrence. The large number of genes tends to reduce the conservation of any given residue. Nonetheless, the characteristic OR sequences can be easily seen. FIG. 4 shows that both Classes have the characteristic olfactory receptor specific regions, e.g. MAYDRYVAIC in TM3-IC2 (SEQ ID NO. 2593), FSTCSSH in IC3-TM6 (SEQ ID NO. 2594), and the three conserved cysteines in EC2. However, there were also regions that were quite distinct between the two Classes. For example, the ‘MAYDRY’ (SEQ ID NO. 2595) motif was more often ‘MAFDRY’ (SEQ ID NO. 2596) in Class I ORs; there were 3 conserved prolines in TM7 of Class I ORs, but only 2 prolines in Class II ORs; a highly conserved region starting from the middle of IC2 to the middle of TM4 (M . . . C . . . Lv . . . sW) was present in virtually all Class II ORs but absent in Class I ORs.

[0108] Transmembrane domains 4 and 5, and to lesser extent TM3, have been shown to be the most variable regions. (Pilpel, Y. & Lancet, D., “The variable and conserved interfaces of modeled olfactory receptor proteins,” Protein Sci 8, pp. 969-77. (1999)). This is also clear in the logo view, where fewer conserved residues appeared in these regions. Through the analyses of conserved and variable regions of the mammalian ORs, the present invention may provide key regions that may be instructive for functional studies of ORs in particular, and GPCRs generally.

### Example 11

### Comparison with other Mammalian Species

[0109] The most closely related species to mouse with numerous sequences available in the ORDB is the rat. Isolated examples have suggested that the two species might have very similar OR repertoires (e.g. rat I7 and mouse I7 receptors are 95% identical.) (Krautwurst, D., Yau, K. W. & Reed, R. R. Identification of ligands for olfactory receptors by functional expression of a receptor library. Cell 95, 917-26 (1998)). The present invention shows that the two species do indeed have similar OR repertoires, with 90% of the 65 rat ORs having a mouse ortholog with more than 80% identity. However, 45% of the rat ORs did not have a mouse ortholog with >90% identity, indicating that there are significant differences between the two repertoires as well (Table 3). Identifying precisely where the sequences diverge may provide interesting hints regarding functional differences between receptors in the two species.

TABLE 3
Cross-species matches with mouse OR database
Intact human ORs (347) and rat ORs (65) were compared with
mouse OR database, the protein identity of the closest match
of each gene were used for calculation.

| | >40% | >60% | >80% | >90% | >95% |
|---|---|---|---|---|---|
| Species | identity | identity | identity | identity | identity |
| human | 100% | 93% | 58% | 5% | 0.3% |
| | (347/347) | (323/347) | (200/47) | (18/347) | (1/347) |
| rat | 100% | 98% | 91% | 55% | 17% |
| | (65/65) | (64/65) | (59/65) | (36/65) | (11/65) |

[0110] More distant from mouse, humans show significant differences in the OR repertoire. Although all intact human OR genes had mouse orthologs of more than 40% identity, only 59% had an ortholog with >80% identity, and the number drops to 4% for ORs with a mouse ortholog of >90% identity (Table 3). One OR gene (OR93) has been identified in a few species of apes; it has an ortholog with 96% identity in human (OR5G3P), but the closest match in mouse had only 80% identity. A few dog ORs seem to fall somewhere in between human and mouse, showing around 80% identity to either species.

[0111] Since the complete human OR repertoire is available by the present invention, a comprehensive phylogenetic analysis of the human and mouse OR subgenomes is possible. Some 347 human intact ORs have been classified into 119 families 9, and 119 consensus sequences were produced for each of the human OR families. This permitted us to build a phylogenetic tree of consensus sequences of all human and mouse OR families as shown in FIG. 5a. FIG. 5a shows an unrooted phylogenetic tree of the consensus sequences of mouse and human OR families. Consensus sequences from each human and mouse OR family were used to build a Neighbor Joining tree with 1000 bootstraps. Human OR families are indicated by filled triangles A few groups, or clades, with high (>90%) bootstrap value are labeled by dots. The Class I OR families are shaded in gray and they form a group with more than 90% bootstrap value. In this two-species tree, it can be seen that although the mouse genome possessed nearly triple the number of intact ORs, the overall structures of the two OR repertoires were similar, and they covered more or less the same ‘receptor space’. While the mouse generally had more ORs in each broad branch, humans did not appear to have lost any of the major branches.

[0112] Also in FIG. 5a, a group with high bootstrap value and including mostly mouse OR families is shaded and plotted in detail in FIG. 5b. This group contains 11 mouse OR families and only 1 human family. Although there are only 10 intact human ORs in this group, they do not form one tight subgroup, but rather intermingle with the 76 intact full-length mouse ORs covering more than half of the subgroups. Even in some groups predominated by mouse families, human ORs in those groups still intermingled with the mouse ORs and covered a relatively broad space. This suggests that the human olfactory system has probably retained the ability to recognize a broad, if perhaps less discriminating, spectrum of chemicals while using one-third the number of ORs as in mouse.

[0113] Also in FIG. 5a, the Iva1 ORs, i.e. Mouse OR families 258 and 259, are shaded, indicated by open diamonds, and plotted in detail in FIG. 5c. These groups were present only in mouse and show a high bootstrap value (FIG. 5c). These exclusive mouse groups were not common and were typically small. Given that olfactory coding is likely to be primarily combinatorial, using numerous ORs to recognize an odor compound, the missing ORs in humans are more likely to alter sensitivity or discrimination, but not the range of detectable compounds.

The application's sequence listing, which the Patent Office published only in electronic form, follows.

SEQUENCE LISTING (2596 sequences)

SEQ ID NO: 1 - DNA, 924 bp, Mus musculus
  MOR1-1
atgtggtccaatatcagtgctgccccctttctgctgactggcttcccaggactggaagcagctcatcactggatctctatccccttctttgccatctatatctctgtgcttctgggcaatggcacacttctctacctcatcaaggatgaccacaacctccatgaacccatgtactatttccttgccatgctggcaggcacagacctcacagttacactgactacaatgcccactgtaatggctgtattatgggtgaatcatagagagataagacacggagcctgcttcttacaggcctacatcattcactccctttccattgtggagtcaggtgtcttgcttgccatgtcttatgatcgatttgtcgccatctgcacacctctgcattacaactctatccttaccaattccagggttatagctataggacttggggtggtactgaggggctttttgtctcttgtgcccccaatcctgcctctcttttggttctcatattgccgttcccatgttctttctcatgccttctgcctccaccaagatgtcatgaaactggcatgtgctgacattacctttaaccgcatatatccagttgttttggttgccctgactttcttcctcgatgcgctcatcattgtcttttcctatgtcctcattctgaagacagttatgggcattgcctctggagaggagagagcaaaggctctcaacacctgtgtttcacacattagctgtgtcctggtcttttacatcactgtgattggcctgaccttcattcacaggtttggaaagaacgctccccatgtggtgcacattaccatgagctatgtctactttctctttcctccatttatgaaccccatcatttacagcatcaagaccaagcaaattcagaggagtgttctccatctcctatctgtataa

SEQ ID NO: 2 - DNA, 948 bp, Mus musculus
  MOR1-2
atgccttcaatgtggctcaacatttcctcttccccattcctgctcacaggcttcccaggtctggagaaagcccatcacctgatctccctcccattactgatggcctatatctccatattgcttggcaacggcaccctccttttcctcattaaggatgaccataacctccatgagcccatgtattatttcttaggtatgttggcagctacagatcttggagtaacattgaccaccatgcccacagtgctgagtgtactatggttaaatcacagggaaattggccatggagcctgcttctctcaggcctattttatccacactctctctattgtggagtcgggggtcttgcttgccatggcctatgaccgtttcattgccattcgcaacccactaaggtataccaccatccttacagatactaaggtaataaagattggcataggcttagtgatgagggctggtctgtcaatcatgccaataatcattcgcctgcattggtttccctattgtcgctcccatgtactctcccatgctttctgtctacaccaagatgtcatcaagctagcctgcgctgacatcacattcaatcgtctctatcctgttgtggttgtatttgcaatggtcttgctagatttcctgatcatcttcttctcctacgttttgattctcaagactgtcatgggcattgcttctacagatgagcgggccaaggctctcaacacatgtgtctcccacatctgttgcatcttggtcttctatgtcactgtggttggtctgacgtttattcacaggtttggaaagaatgttcctcatgtcgtccacatcacaatgagctacatctactttcttttccccccttttatgaaccctgtcatctatagcattaagaccaaacagattcagagtggtttgcttcgcttgttctccctgccttgttctaaaacctga

SEQ ID NO: 3 - DNA, 936 bp, Mus musculus
  MOR1-3
atgtggcccaacagcagtgatgctcctttcctactgactggctttctgggcttggaaatgattcaccactggatctctatccctttctttgtcatctacttctccatcattgtagggaatggtacccttctcttcatcatttggagtgaccacagccttcatgagcccatgtactacttcttggctgtgctggcaagtatggaccttgggatgacactaaccacgatgcccaccgtgctgggtgtcctggtgctaaaccagagggagattgtacatggggcctgtttcattcagtcctacttcattcactcactagccattgtagaatcgggggtcttgcttgccatgtcttatgatcgatttgttgccatctgcacacctctgcattacaactctatccttaccaattccagggtgatgaagatggcactgggagcactgctcagaggatttgtgtccatcgtgcccccaatcatgcctctcttttggttcccatactgccattcccatgttctttctcatgccttctgcctccaccaagatgtcatgaaactggcatgtgctgacattacttttaacctcatatatccagttgttttggttgccctgactttcttcctcgatgcgctcatcattatcttttcctatgtcctcattctgaagaaagttatgggcatcgcctctggagaggagagaaaaaagtctctcaacacctgtgtttcacacattagctgtgtcctggtcttttacatcactgtgattggcctgaccttcattcacaggtttggaaagaacgctccccatgtggtgcacattaccatgagctatgtctactttctctttcctccatttatgaaccccatcatttacagcatcaagaccaagcaaattcagaggagcattctccgtctactgtccaaacacagtaggacttga

SEQ ID NO: 4 - DNA, 954 bp, Mus musculus
  MOR1-4
atgcctgtaatttggctcaacacctcaacctacccattcctgctcacaggcttcccaggtctggagaaatcccatcacctgatctccctcccattactgatggcctatatcttcatattgcttggcaacggcaccctccttttcctcattaaggatgaccacaacctccatgagcccatgtattatttcttaggtatgctggcagctacggatcttggagtaacattgaccaccatgcccacagtgctgggtgtactatggttaaatcacagggaaattggccatggagcctgcttctctcaggcctattttatccatagtttctctattgtggagtcgggggtcttgcttgccatggcctatgaccgtttcattgccattcgcaacccattaagatataccaccatccttactgatattaaggtaataaagattggcataggcgtagtgatgagggctggtctttcaatcatgccaataatcattcgactgcattggtttccctattgtcgctcccatgtactctcccatgctttctgtctacaccaagatgtcatcaagctagcctgtgctgacatcacattcaatcgtctctatcctattgttgttgtattttgcatgggacttttggattttttgattatttgtttctcctacattttgattctcaagactgtcatgggcattgcttctacagatgagcgggccaaggctctcaacacatgtgtctcccatatctgttgcatcttggtcttctatgtcactgtggttggtttgacatttattcacaggtttggaaagaatattcctcatattgtacatataacaatgagctacatctgcttccttttccccccatttatgaaccctgtcatcttcagtattaagaccaaacagattcagagtggtttgcttcgcttgttctcactgccttattctagaattcgactctga

SEQ ID NO: 5 - DNA, 945 bp, Mus musculus
  MOR13-1
atgggaggtgaagcccacaacagctctgggttgcctcccttcatcttgacaggactgccagggatggagacctcccagcactggttgttcctgctccttggtgttctttacagcgtctccatagtgggcaatgccctgattctgttcatcatcaaggaggaagagagtcttcaccagcccatgtactacttcctatctctgctgtcaggaaatgaccttggtgtgtctttctccacactgcctacagttctgggagtgttttgttttcacttaagagagatcagttttaactcctgcatgtcccaaatgttctttatccatcttttctctttcatggagtctgggattctgctggccatgagctttgatcgctatgtagccatctgtaacccactgcgctattccacagtactcactgatgcccgagtgatgtggatgggtgtatgtgttttccttcgaagtttctgcatgattttcccattacctttccttctgaagaggttgcccttctgcaaggctaatgtgctctctcatgcctactgtctgcatcctgatctgattcgactgccttgtggtgacacttccattaataatatatttggtctgtccattgtcatctctacctttgggctggattctgcactcattttcctttcttatgttctcatacttcgctcagtgcttgctattgcctcccgggaagaaaggatgaaaacactgaatacatgtgtgtcacacctgtgtgctgtgctcatcttctatgtgcctaaggtaggtgtgtccatgtttgctcgctatgggaggcatgcccctcactatgtacacacactcttgtcactcatctatctctttgttcctccaatgctcaaccctgtcatctactccatcaaaaccaaggagattcgtcggaggttttgcaaaatcctgctggggaacaaattttga

SEQ ID NO: 6 - DNA, 966 bp, Mus musculus
  MOR5-1
atgttgcgtccatcaagtatgtcagaagtaactaacaccactcatggccctttctacttcatcctcaccggcatcccaggatttgaggatatccatctctggatctccatccccttcttctgcctctacaccatatccatcatgggcaacaccaccatcctaactgtcatccgcacagagccatctctccacgagcccatgtacctcttcctctctatgctggccctcactgacctgggtctaactctcaccacactccctacagtcatgcaggtcctctggttcaacattcgggaaatcagctttgaggcctgctttgcacaggtattcttcctccatgggttctcattcatggaatcatctgttctattggccatgtcctttgaccgttatgtggccatctgtcgcccactccactatgcctccatcctcaccagtgaggtcattgctagaatagggttggccatcatttgccgctgtgtcttggctgttcttccctcccttttcctgctcaagcgcctgcccttctgccattcccaccttctttctcactcctactgcctccaccaggatatgattcacctggtctgcgctgacatcagagtcaacagatggtacggatttgctctggtcctgctcattattgtattggaccctctgctcattgtactctcctatgcacttatcctgaaaagtgtcctgaacacagccacttggactgaacgactccgggctctcaacaactgtctgtcccacatgctagctgttctggttctctatgtccctatggttggtgtgtctatgactcaccgctttgcgaagcatgcttctccactggtccatgttctcatggccaatatctatctgctggcacctcctgtgatgaaccccatcatttacagtgtaaagaccaagcagatccgtcaaggaattactcgcctcctgttgcaaagaaaggtgcactaa

SEQ ID NO: 7 - DNA, 954 bp, Mus musculus
  MOR2-1
atgaaggtgtctattccaccacgtgccaacttcagctacgctatatttttgctcaccggcttcccaggtctggaatgggctcatcattggatttcactgcccatatttatggggtattttgtagccatcatgggtaatgccactatcttgcatctggttcgaactgacccttccctccaccagcccatgtactacttcctggccatcttggccgtgacagacctgggcttatgcatgtcaacgctgccttctgtgctgggggtgttatggtttgatgcccggatggtgggtctggtgccctgtgtgctccagcagcacttcctccactctttctccttcatggaatcagcagtgctatttgctatggctctggaccgtctgatagcaatccgattcccgctgcgctatgcatctgtgctcactgggccccgtgtggcattgataggcacggtgctgggtatgcggagtgcagctattacagccgcaccctcactacatctactgacatttgactactgtcaccctggtgctctctcccatgcctattgtcttcatcaggacatgatccgtctggcctgttctgacacccgcttcaacagactctatggactgtgcatcatcatgctagccatgggttcagatgtcctcttcatcctgctctcctacgctgtcatcctccgcacagtgctggccattgcctctgcaggggagaggctcaaggccctcaacacgtgcgtctcccacatcctggctgtactctgtttttatgttcctgttctgggcctgtccattgtgcacagatttggacagcacacctcacccctggtgcacatcctaatgggcacagtgtctgtgctttttccacccgtgatgaaccctgttatctacagcatcaagacccaacagatccgcagggccattgtcaaggtgatttcactgggtaagattcagtaa

SEQ ID NO: 8 - DNA, 966 bp, Mus musculus
  MOR5-2
atgttgcatccatcaagtatgtcagaagtaacaaacaccactcatgatcctttctacttcatcctcaccggcatcccaggatttgaggatatccatctctggatctccattcccttattctgcctctacaccatctccatcatgggaaacaccaccatcctaaccgttatccgcacagagccatctctccaccagcccatgtacctcttcctctccatgctggccctcactgacctgggtctaactctcaccacactccctacagtcatgcagctcctttggttcaacatccgagaaatcagctttgaggcctgttttgcccagttcttcttcctccatgggttctctttcatggaatcatctgttctattggccatgtcctttgaccgttatgtggccatctgtcgcccactccactatgcctccatcctcaccagtgaggtcattgctagaatagggttggccatcatttgccgctgtgtcttggctgttcttccctcccttttcctgctcaagcgcctgcccttctgccattcccaccttatttctcactcctactgcctccaccaggatatgattcacctggtctgcgctgacatcagagtcaacagctggtacggatttgctcttgtcctgctcattattgtattggaccctctgctcattgtactctcctatgcacttatcctgaagagtgtcttgaacacagccacttggactgaacgactccgggctctcaacaactgtctgtcccacatgctggctgttctggttctctatgtccctatggttggtgtgtctatgactcaccgctttgccaagcatgcctctccactggtccatgttctcatggccaatatctacctgctagcacctcctgtgatgaaccccatcatttacagtgtaaagacaaagcagatccgtcaaggaattactcgcctcctcttgcagagaaaggtgcactga

SEQ ID NO: 9 - DNA, 981 bp, Mus musculus
  MOR31-1
atgaaggtggcctcttcctttcacaatgacaccaatccacaggatgtgtggtatgttctgattggaattccaggactagaagatctacactcctggatagccatccccatctgttctatgtacatcgtggctgtcataggcaatgtcctcctaatcttcctgatagtgactgaacgcagtctgcatgagcccatgtatttttttctctccatgctggcattagcagacctcctgctctccacagctacagcccccaagatgctggctatcttctggtttcattccaggggtatatcctttggtagttgtgtgtcccaaatgttcttcatacatttcatctttgtggcagagtctgctattcttctggccatggcatttgaccgctatgtggccatctgttacccactgagatacaccaccatccttacttcctcagtcattggcaagattggcacagcagctgtggtcagaagctttctcatctgttttccattcatcttcctggtatatcgacttctgtattgtgggaaacacataattccccattcatactgtgagcacatgggcattgccagattggcatgcgacaatatcactgtcaacatcatatatgggctgacaatggccctcctgtctactgggctagatatactactcatcattatttcctacaccatgattcttcgcactgtttttcaaatcccttcctgggctgccagatacaaggccctcaacacatgtggctcccacatctgtgttattcttttattctacactcctgcattcttttcattttttgcccatcgctttggaggcaaaaccgttcctcgccacatccacatcctagtggccaacctctacgtggtggtgcccccaatgcttaaccctatcatctatggtgtgaagaccaagcagatccaagatcgagtggttttccttttctcctcagtgagtacatgtcaacatgacagcagatgttaa

SEQ ID NO: 10 - DNA, 948 bp, Mus musculus
  MOR31-2
atgcttggaactaacttcactatcatccatccaactgtgttcatcctgcttggaatcccagggctggagcagtaccacacctggctttctattcctttttgtcttatgtacattgctgcagtcttggggaacggagccctcatccttgttgtcctgagtgaacgcaccctccatgagcccatgtatgtctttctgtccatgctggctggcactgatattctcctgtcaaccaccactgtgcctaagaccttggctatcttttggttccatgctggggagatcccctttgatgcctgcattgctcagatgtttttcatccacgttgcttttgtggctgagtcgggaatccttctggccatggcatttgaccgatatgtggctatttgtactcctctgagatactcagccgtcttaacacctatggcaattggaaaaatgaccctggccatctggggacggagcattgggacaattttccctatcatatttctgctgaagaggctgtcatactgcaggaccaatgtcatcccacactcatattgtgagcatattggtgtagccagattggcttgtgctgacatcactgtcaatatctggtatggcttctcggtgccaatggcttcagttttggtagatgttgcactcattggtatttcttatacgttgatcctccaggctgtgtttagacttccttcccaggatgctaggcacaaggccctcaatacctgtggttctcacattggggtcattctcctctttttcataccatcattttttactttccttactcatcgctttggcaagaacatcccccaccatgtgcacattcttctggcaaatctctatgtgttggttccccccatgcttaaccctatcatctatggtgctaagaccaagcaaattagggacagcatgactcgcatgttgtctgttgtgtggaagtcttga

SEQ ID NO: 11 - DNA, 942 bp, Mus musculus
  MOR7-1
atggccatcctttacaacagcagcctccaaaaagccactttcttcctgacaggctttcaaggtctggaagaattccatggctggatctccattcccttctgctccatctacttaatagtcattttaggaaacctcactattctccatgtcatccggactgatgccactctccatgaacctatgtactatttcttggctatgctggccctcacagacttgggactctgcctctccacactgcccactgtgctgggaatcttctggtttgatgccagagagattggtattcctgcctgctttactcagctattcttcatccacaccttgtctttagtggagtcatcggttctactgtctatgtccttcgaccgctatgtagcaatttgcaacccactgcgttattctaccatcctgacgcccagaaggattgtgaagatggggctgagctcagtactcagaagtgcactcctcattctcccattacctttcctccttaaacgcttccattattgccgatcccacgtgttagcccatgcctattgtctacatctggagatcatgaaactagcctgctccagcatcattgtcaatcatatctatgggctctttgttgtggcctgcactgtgggtgtagactccctgcttatattcctctcatacaccctcatcctccatgctgtactaggcaaagcctcccgtcaggagcgcctccgtgctctcaatacctgtatctctcatatctgtgcagtactgcttttctacatccccatgattggcttatcccttgtgcatcgctttggtgagcaccttccccgcattgtacatcttctgatgtcatatgtgtatctattagtaccacccctcatgaaccccattgtctacagcatcaagaccaagcaaatacgacagcgtatcatcaagaagtttgagtttataaagtaa

SEQ ID NO: 12 - DNA, 957 bp, Mus musculus
  MOR8-1
atgcttgtgaagtcttctatcatgtccgttctcaattcctcagaaattgagatcaccaccttcttcctgattggaatcccaggcctggagtatgctcatgcgtggatctccattcccatctgcctcatgtacctggtggccatcctgggcaactgcaccatcctttttgtgatcaggactgaaccctcactccatgctccaatgtactatttcctttccatgttggccatctctgacttgggcctgtccctttcctccctccccaccatgctccggatctttgtgttcaatgccacaggaatctccccaaatgcctgctttgctcaagaattctttatccatggcttcactgacatggagtcctcagtgcttctgatcatgtcttttgaccgcttcttggccatacgcaaccccctcagatacagctctatcctcaccagtgcaagagtcgccaaaatgggactggtgtttctcattaaaagcatgctcctagtgctcccatttcctttcactctgaaaagactggcatattgtcagaaaagcctcctttctcactcctattgtctccatcaggatgtcatgaagctggcctgctctgacaacacagtcaactttttctatggtttttttgttgcactctgtatgatgtcagacagtatgttcattgctgtctcttacatattcatcctgaagaccgtgatgggcattggatcccataaagagcgcctcaaggccctcaatacctgtgtctcccacatctgtgctgtgctcatcttctatgtacctatcattgctttagcatccatgcaccgctttggcaagcacaagtcacctatggccatgatccttattgctgacatcttcttgctagtgccacctttgatgaatcccattgtgtactgtgtaaagacacggcaaattcgtgaaaaggttctaggaaaattaggtctaaaataa

SEQ ID NO: 13 - DNA, 945 bp, Mus musculus
  MOR14-1
atgccaactttccagaacaccacagcttcttccatcattttcctgctcactggtgtgcccgggctggaagctttccacacctggatctccattcccttctgctttctctatgcaactgccctgtcagggaacagcctgattctctttgtcattatcacccagcccagcctccacgagcccatgtattacttcctctccatgctatccaccactgacctcgggctctccatctccactctggccaccatgctggggatattctggttcaacgccagggagatcagcttcaatgcctgcttgtcactgatgttcttcattaaactcttcactgtcatggaatcctcagtgctgttggctatggcttatgatcgttatgtggccatctccaaccctcttaggtatgccactattttaactgattccagaatagctcaaattggggtgacaattgtcatcagagggactgtaatgttgacaccgatggtcgcacttcttaagagactaaccttctgcagcagccgtgtgctccaccactcctactgtttccaccccgatgtcatgaagctctcatgcacagacaccaggatcaacaatgcagttggattgactgccatgatctctactgttggtgtggactcagtccttattctcctttcctacatcctgatcatcagaactgtcctcagcattgcttccccagaagagaggaagaaagccttcagcacgtgtatctcccatatcggggctgtagctatattctatattccattgatcagtttgtcctttgttcacagatttgggaaacgagctccaccctatgtacataccatgattgctaatacctacctgctgattcctcctgtcatgaaccccatcatctacagtgtgaagaccaaacagatacgtaaagctgtgataaaagttttccaatctaaagaaatatag

SEQ ID NO: 14 - DNA, 957 bp, Mus musculus
  MOR11-1
atgatcccttctgggccattcatcaacatctccttcttccagccacagtcttttctcatgattggcatcccaggactagagtttgcccatggctggatctccatccccttctccttcatgtacactgtagcactcactggaaactgcctcatcctcctggctgtgaggaggacacatagcctacaccagcccatgtactactttctgtccatgctagccctaagtgatgtgggtctcagtttatccacattgccttccaccctggctgtgctctggtttgactatcgttccatcgacttcaatgcctgtcttgtccagatgttcttcttacactccttctctgtggtagagtcctcagtcctcttggccatgtcatttgaccgctttgtggctatctccaacccactgcgctatgcatctgtcctcactaacaatgtcatcatcaggattggggtggccattgtagctcgagccaccctgtccctattcccagtgcccttcttgctgaagagactgaactactgccctggcaagatcctcctgtctcactcattctgtttccatgctgatgtcatgaagctggcctgtgctgacattactgtcaacatcctatatggactctatgtggttctgtccacagtgggtgtagactccttgcttattgtcatgtcctattccttgattcttcacacagtcatggggctagcctctcccagggagcgtgtccggaccctcaacacatgtgtttcccatatcttggctgtcctggtcttctacattccagtcataggtgtctccatgatccatcgttttggaaagcacctgcctcacattgttcatgccctggttgcgtatgtgtaccttgtggtgcctcctgtgctcaaccccatcatctacagtgtcaagtccaagcccatcaggggagccatgttcaaagttctgagaggaaaagactag

SEQ ID NO: 15 - DNA, 954 bp, Mus musculus
  MOR8-2
atgcatactggtatgtccattttcaacctctcagttactgaagtttctacgttccatttggttgggttcccagggatggaatctgcccacatttggatcttcatccccatatgtctcctgtacactgttgccatcctgggaaactgcactatcctctttttcataaaatcggagccttctctgcatgaacccatgtactatttcctctccatgttggctctctctgacctgggactgtccatttcctctcttcctaccatgcttaaggttttcctgttcaattctccagacatttctcctaacgagtgttttgcccaggagttttttattcatgaattctcagctatggagtcatctgtgcttctcattatgtcctttgatcgctatattgccatctgtaaccctctgagatacacttccatccttaccagtgccagggtccttcaaatcgggcttgctttttctctcaagaatgtgctgttgatcctgcctttccctgtaactctagtgcgtctaagatactgcaagaagaatctcttgtcacattcctattgccttcaccaggatgtcatgaaactggcctgctcagacaacaagttcaatgtcatctatggcttatttgtggctctcacaggcatccttgacataaccttcattttcatgtcatatgcactcatcctgagagcagtgctgggcattgcatcccaaagggaaagactcaaggtcctcagtacttgtgtctctcacatctgtgctgtgctcattttctatgtccctgtcatctcccttgctgtcatctatcgccttgcgagtcgtagttcccccatatctaagattctcatggctgacattttcttgcttgtgcctcctgtaatgaatcctatcatatactgtgtgaagagccaacagataagaaatgtgattctagagaaactgtgtcagaaacaaagctga

SEQ ID NO: 16 - DNA, 939 bp, Mus musculus
  MOR8-3
atgattctcaatacctccgaggtcgaaatctcttcattcctactgattgggatcccaggctttgagcatatgcacatttggatttccatccctatctgcctcatgtacctgacagctatcctgggaaactgcaccattctctgtgtcatcagaacagagccttctctgcatgagcccatgtactattttctctccatgttggccttctctgatctaggtctgtctttctcctccatccccactatgctaagaatattcttgttcaatgccatggggatttccactgatgcctgcattgcccaggaattcttcatccatggattcacagacatggaatcttcagtgctcctcattatgtcctttgatcgctttgtagccattcggcaccccctaagatacagtgccatcctcacaagctccagggttgtgcaaattgggctagccttttctgttaaaagcattctcctggtgcttccccttccattcactttaaagagactcagatactgcaataaacgcctcttgtcacactcctattgtctccaccaggatgtcatgaagctggcgtgctctgacaacagggttaacttttactatgggctgttcgttgcactctgcatgatgtcagacagtgtgttcattgctgtgtcttacgtgttcatcttgaagacagtgttgggtattgcatcccatggggagaggctcaaagctcttaatacttgtgtatcccatatctgtgctgtgctcattttctatgtccctatcattaccttagctaccatgcatcgctttgcaaaacataaatctccattagctatgattctgatagcagatgctttcttgctggtaccacctttgatgaatcccattgtgtattgtgttaaaactaggcagataagagtaaaagttttagaaaaactgggtctgcattctaagtaa

SEQ ID NO: 17 - DNA, 939 bp, Mus musculus
  MOR7-2
atgactccaggacccctaggaaatggaagcatgtcttctaccttcttgctgagtggcatccctgggctggagcacatgcatatctggatctcccttccactctgtctcatgtacctggtttccatcctgggtaactgcacaatcctttttataattaagacagagccctcactccatgagcccatgtacctcttcctgtccatgctcgctctgactgaccttggtctctctctttgtaccctccctacagtgctaggcatcttttgggtgggagcacgagacattagccatgatgcttgctttacccagctctttttcatccactgcttgtccttcttagaatcctctgtgcttctctctatggcctttgatcgctttgtggctatctgtcgtcctttgcactatgcttccatcctcacccacacagtgattgtcagaataggtctggcctctctgggccgtagtgttgcactcattttcccattgcctttcatgctcaaacggttcccttactgtggctccctagttctctcacattcctattgtctccatcaagaagtgatgaaactggcctgtgcagacatcaaggcaaacagcatttatggcatgttcgtcattgtttctacagtgggagtggactctttgctcatcctcttctcctatgcacttattctgcgcaccgtattgtccattgcctcaagggctgaaagactcaaagctctcaatacatgcgtttcacacatctctgctgtgcttctgttctatactcccatgataggattgtctgtaatccaccgctttgggaaacaggccccccatctagttcaggtggtcatgggctttgtgtatctcctcttccctcctgtgatgaaccctattgtctatagtgtcaagaccaaacagatacgggatagggtagcccatgccttttgcaactag

SEQ ID NO: 18 - DNA, 936 bp, Mus musculus
  MOR223-1
atgtcaaatgtgactctagtgaccacattcttcctctcaggtattccccatccaccagccctggacaccatgctctttgtagccttcttggtgatttacattctcactgtgctgggcaacttcctgattctgatggtaatcagggtggactcccacctccacacacccatgtactacttcctcaccaacctctcctttattgatatgtggttctccacagtcacagtacccaaaatgttgatgacgttggtttccccaaggggaggggctatctccttccatagctgtgtggcacagctctattgcttccacttcctgggtagcaccgagtgtttcctgtacactgtcatgtcctatgatcgctacctggccatcagttacccactcaggtacagcagcatgatgagtgggagagtgtgtgccctcctggcagcaggaacatggatcactggttccctgcactctgctgtccagactacattgaccttccgtttgccctactgtggtcccaaccagatccagcattatttctgtgatgcacctcccatcctcaagctggcttgtgcagacacctcagccaatgagatggtcatctttgtgaacatcggggtagtggcttcgggctgctttcttctgatttcgctgtcctatgtgtccattgtctgctccatcctgaggattcgtacttcagagggccggcacagagctttccagacatgtgcctcacactgcatcgtggtcctctgtttctttgtgccctgtgtttttatctacctgaggccaggctccagggatgctgtggatggagttgtggctgttttctacactgtgttgacacccctactcaaccctgttgtgtacaccctgaggaacaaagaggtgaagaaagcactagttaaactcaaagacaaagtagcatattctcagagccagtaa

SEQ ID NO: 19 - DNA, 933 bp, Mus musculus
  MOR171-1
atgagcccgggaaatcactctgaagcatccttatttgtccttgaggggttaacagaccagccagggctccagatcccacttttctccctgtttctgttgatctatttggtctccatggcaggaaacctgggcttagtctttttaatcagaattagctctcagcttcacacgcccatgtatcatttcctcagtaacttgtcctttatagatctctgctactcctccgttataatccccaagatgttggtgaactttgtatcagagaagaattttacagcctttcctgaatgcatggtccagctctttctgttctctttctttggtattgatgactcctacatgctaacagccatggcatatgatcgttacgttgccatctgcaaccccttgctctataatgtcactatgtctcacagggtctgcatgctactgtccactgctgtgtatgctatgggggccttcggggctacagttcatacaagctacatatccagtcgttccttctgtggaactaatgtcattcatcattacttctgtgacatcctccctcttataaatatagcttgctctagagactataccaaggagttttgggtgatgatacttgttggatttaatgtttttgcaagtgtgttttccatcttcatctcttacgccttcatccttgcaagcattctgcgaatacgctcagctgatggcaggtctaaagccttcagtacctgcagttcccatcttgcagctgttggagtcttctatggctccatcatcttcatgtattttaagccatctacaggtaacacaacccaggagaaagtggcttctgtcttttacaccacagtgattcccatgcttaatccccttatatatagccttaggaacaaagatgtcaaagaagccattaaaaaggctctgaatagtgggctgttctcttag

SEQ ID NO: 20 - DNA, 933 bp, Mus musculus
  MOR223-2
atgttaaatggaagtgtagtgaccacgttcttcctctcaggtcttccccatccaccagtcctggactccatgctctttgggatcttccttgtgatttatattcttactgtgttgggaaaccttctcatcctgatggtgatcagggtggattcccacctccacacaccaatgtactacttcctcaccaacctctcctttattgacatgtggttctccacagtcacagtgcctaaaatgctgatgactttggtgtccacagggggcggggctatctccttccatagctgtgtggcacagctctattgcttccacttcctgggtagcaccgagtgtttcctgtacacagtcatgtcctatgatcgctacctggccatcagttacccactcaggtacagcagcatgatgagtgggagagtgtgtgccctcctggcagcaggaacatggatcactggttccctgcactctgctgtccagactacactgatttttcatttgccctactgtggacccaatgagattcagcattatttctgtgatggaccacccatcctcaagctggcctgtgcagacacatctgccatcgagatggtcatctttgtgaacattggggtagtggcttcgggctgcttttttctgatttcgctgtcctatgtgtccattgtctgctccatcctgaggattcgcacttcagagggccggcacagagctttccaaacatgtgcctcacactgcatcgtggtcctctgtttctttgtgccctgtgttttcatctacctgaggccaggctccagggatgctgtggatggagtggtgacagttttctacactgtgttgacacccctactcaaccctgttgtgtacaccctgaggaacaaagaggtgaagaaagcactgtttaaactcaaagataaagtagcattttctcaaagatag

SEQ ID NO: 21 - DNA, 936 bp, Mus musculus
  MOR223-3
atgtcaaacacaagcatagtgaccacattcttcctctcaggtcttccccacccaccagtcctggactccatgctctttgggatcttccttgtgatttatattcttactgtgttgggaaaccttctcatcctgacggtgatcagggtggattcccacctccacacaccaatgtactacttcctcaccaacctctcctttattgacatgtggttctccacagtcacagtgcctaaaatgctgatgactttggtgtccacagggggcggggctatctccttccacagctgtgtggcacagctctattgcttccacttcctgggtagcaccgagtgtttcctgtacacagtcatgtcctatgatcgctacttggccatcagttacccactcaggtacagcagcatgatgggtggcagaatgtgtgccctcctggcagcaggaacatggctcactggttccctgcactctgctgtccagactacattgaccttccatttgccctactgtggtcccaaccagatccagcattatttctgtgatgcacctcccatcctcaagctggcctgtgcagacacctcagccaatgagatggtcatctttgtgaatatcggggtagtggcttcggggtgtttttttctgatttcgctgtcctatgtgtccattgtctgctccatcctgaggattcgcacttcagagggccggcacagagctttccagacatgtgcctcacactgcatcgtggtcctctgtttctttggccctggtctcttcatctacctgaggccaggctccagggatgctgtagatggaattgtggccgttttctacactgtgttgacacccctactcaaccctgttgtgtacaccctgaggaacaaagaagtgaagaaagcactgttgaaaataaaatatgggtctgtgcttcctcaggataaataa

SEQ ID NO: 22 - DNA, 951 bp, Mus musculus
  MOR16-1
atgttctgcaataccagcactcctggccactccaccttcctcctcactggctttccaggcctggaggcctcccatcactgggtttccattcccatcaacctcatctgtgtggtttccatcctgggcaacagcgttatccttttcctgatccgtacggatccagccttacatgagcccatgttcatcttcctgtccatgctagcagcctctgatctgggcctctgtgcctccaccttccccaccatggtgcggctcttctggctgggtactcgggagctgcccttcgatttctgtgcagcacagatgtttttcatccacgccttcacctatgtggaatctggtgtgctattggccatggcctttgatcgcttcattgccatccggaatcctctgcattatgccaccatcctgcctcactcagcagtggccaaagttggggctgctgttctggtgagggccatcctgctcaaccttcccggacccatccttctgcggcgtctgatctttcctcagatcagtaccctctcccactgctactgtctgcactgcgacctcgtgggactggcttgctcagacacccgcatcaacagcctggttggcctggtttccatcctcctctcactaggcctagactcctccctcatcatgctgtcctatgctctgatcctacggactgtgctgggcattgcatcacccggggaaaggctcaaggcactcaatacgtgtgtctcacacctctgcatcgttctcatcttttatttgcccaagttggggctgtccgtgctgcaccgagtggagaaacacagctacccagctctggccgtgctcatggctaacctgcacttcttggtgccacccttcatgaaccctgtggtctactgtatcaagtcgaagcagatccgtcagggcttcttaaggcgtttccagcagaagagggttgatatttcctaa

SEQ ID NO: 23 - DNA, 948 bp, Mus musculus
  MOR10-1
atgaattcaaatgcttcacaaaccaatcaccatagcttcattctgacaggcatcccagggatgccagacaagaacccgtggatggcctttcccctgggctttctctacacactaacccttctgggaaatggcaccatcctagcagttgtcaaggtagagcagagcctccatgagcctatgtactacttcctctgcatcttggctctgactgatgttagtctctccatgtctaccttgccctctatgctaagtatcttttggttcaatgcccctgagattccttttgatgcatgcatcacgcagatgttcttcatccatggatttggagtagtagaatctggagtcttagtgtccatggcctttgacagatttgtggctatccgagacccattgcgttatgcttccatccttactcatgggcttattggaaagattggactagttgtcttggcccgggcagtctgtgtggtcttcccagtgccctttcttataaaacggctgcccttctgtcgttccaatgtcttatctcattcatactgtcttcaccaagatgcaatgaggttagcctgtgccagcacccgtgtcaacagcctctatggcctcattgttgtcattctcacattagggctcgatgctctcatcattctcttctcttatgtacttatcctgaagacagtgctaggcattgcctccagagctgagaggctcaaagccctcaacacctgcctctctcacatctgtgctgtgcttctattttacattcctctcattggtgccaccatgatccacagatttgggaaacatttatcaccagttgtgcacatgttcatggctaatatctaccttctccttcctcctgtgctaaaccctattgtctacagtgtgaagacaaagcagatacgtagaaggatcatccaagtgttccgggggagaaagaacatgtcctag

SEQ ID NO: 24 - DNA, 954 bp, Mus musculus
  MOR28-1
atgttggttaataatatcacctcaacccacccagtggccttcttgttgatgggtatcccaggcctagagcacttacatatttggatctccatccccttctgctcagcctataccttggctgtgcttggcaactgcaccctccttttcatcattcgggttgatgcagctctccatgagaccatgtacctctttctggccatgttggcagcaatagatctggtcctttcctcgtcaacactgcccaaaatgctctccctgttctggttcagggatcgggaaatcaatttccatgcctgccttatccagatgttctttctccattcctttgctatcatggagtcagcaatgttgttggccatggccttcgatcgttatgttgccatatgcaaacctctgcactataccaccatcctgaccaagcccctcatcatcaagattggcctggctgctgtgactcgggctgtgacactaatgactccacttccttttctgctcagacgtttccattactgtcgaggcacagtgattgcccactgctactgtgaacacatggctgtggtgaggctggcatgtggggacacacgcttcaataacatctatggcattgctgtggccatgtttattgtggtgctggacctgctcttcgttatcttgtcttacatcttcatccttcgtgctgttctccagcttgcctcccaggaggctcgctacaaggcctttgggacatgtgtgtcgcatataggtgccatcttagccttctatacacctgtagtcatctcctcagtcatgcatcgtgtggctcgtcgggctgctcctcatgtccacatactccttgctaatttctatcttcttttcccacctatggtcaatcctatcatctatggtgtcaagactaagcagattagagagcgagtcttagggctattcctcagaaaggatttaaaaggtgagtga

SEQ ID NO: 25 - DNA, 951 bp, Mus musculus
  MOR31-3
atggcaccttttaactacacaggaaccagccattctgtcttcattctgttgggcatccctggcctggaagagcagcacttgtggatctctctccccttcttcatttcctacctggtggcactctttggaaacatcactctcatccttgtaatcattgcagaacgcagcctccatgagcccatgtacctcttcctctgcatgctggctgcggctgacctcatcttgtctaccaccaccgtgcccaaggctctggccatattttggtttcgtgcgggagcgatttcccttgatggctgtgtcactcaaatcttcttcatccatgctaccttcattgccgagtcggggattttgctggccatggcatttgaccgctatgtggccatctgtgacccactacactacagcacagtgctcagtcatgtgataattgttaggatcggcttggctgtggtcctgagaagtttctgtgtgatcctcccagatgtgttcctggtgaaacgcctgcctttctgccgtagcaatgtgctgccgcacacctactgtgaacacatggctgttgcgaggtttgcctgtgctgatattcgcgtcaatgtttggtatggcttgtctgtcctcctctctactgtagtgctcgatgctctgctcatcttggtctcctacggtctcattcttcacacagtcttccgcctcccttccagaggagccaggcaaaaggctctgggcacatgtggatcccaccttggggttatttccatgttttacctgcctggcatttttaccataattacccagaggtttgggcagcacgttcctctccatacccacatccttctggccaatgtctgcatgctggcccctcccatgctgaatcccatcatctatgggatcaaaaccagacagattcgtgagcgtgtactaagttctttgtcttcacagtggaaactacgctga

SEQ ID NO: 26 - DNA, 954 bp, Mus musculus
  MOR20-1
atgtcagatgtgaatactacttcgaattggcccactttttccttcattggtatacctggtctagaggctgcacatatgtggatctccatccccttctgtctcctgtacctggtagcacttgggggcaacgttcttctcctccttctggttagagcggagcagaatcttcatgaaccccagttctattttttggccatgctagccctcactgatcttggcctctcattgtcaacaatgcctagtgtcttggccatcttctggtttgatgtccacaatgtcggtctggatgcctgtctgacacaaatgttctttattcacacactctcctctgtagagtcaggtgttctggtggccatggcttttgaccgcttggttgctatctgtgctccactaacctacactagaatcctgaatcaccagactgtgctctgcctcagtggagctgccctcatacgaggagccactctattggcccctttgccatttttcctcaggacgtttcctttttgtggggccaatatcctctcacactcctattgttattacccagatatgcttaacttggcctgcggagatgtcacattcagcagtgtatacggattggtctgtgtactctgcacatttgcagtggacgtaatcttcatcttagtatcgtacatgaagatcttgggcactgtgatgaagctggggatccaagatcgaaactggaaatccctgcaaacctgtgtctgtcacctctgcacagtgctggtgttttacttgccactcatcagccttgcagtactgcatcgttacacccaggaaacgtctccaattctctacaccaccatgagcaatgcctacctcctcatgaccccactgctaaaccctctggtttatagcctcaaatctaggcagatccaagctgccttgcgcaagcgatttggagtgcaacgtgttgttgctggggaatga

SEQ ID NO: 27 - DNA, 954 bp, Mus musculus
  MOR19-1
atggaaattacaaacagtagctggttccagccacctacccttcttctaacaggcatccctggactagaagatgtgcagatatggttctgcatcccactatgtgtcatgtacctaattgccctcctaggaaactgcaccatcctctttgttatcagaaccacctccagccttcatgagcctcaatacatattcctatctatgttggcagctacagatgttggtctctctgtatcaactctgccgacagtactgaatgtcttcctcctgaatcacagagatattgagttccactcttgcttgacacagatgttctttatccataccttttcttccatggagtcagccatcctactggccatggcttttgatcggtttgttgctattcgtaattcattacactatactgcagttttaacccccactcggattattaagataggacttgcagctgttgttaggggtgtgatgttaatgatccccttgccaatcctgctcaagcggttgcctttctgtaagggtgtcatactgtcccattgttactgctaccatccagacatcatgaagctggcctgtggtcctgtcagggtcaacatcatctatggattgtctctagtcctctgttcgtttggagttgactctgtatttattgtcatctcttacatcttgattttgaaaacagtgctgggtatcgcctcaggagatggtaagctcaaggcactcaatacctgtgtctcccacatatttactgtctttatattttatgtcccactcattgttctggctctaattcacaggtttggtacatttgcatctcctcttctccatgtcaccatggccaatctttttctcttcttgactcctgttctaaaccccttggtttacagcttaaaaaccaaacagataaggtctgcagtgtgcaaaatatttaaagtttggggaaacttgctcaaataa

SEQ ID NO: 28 - DNA, 960 bp, Mus musculus
  MOR17-1
atggcaacctcaaactccagcaccattgtgtcctctacattctacctcacaggcatccctggctatgaggaatttcatcactggatttccattccattttgcttcctttaccttgttggaataacaggcaactgtatgatcctgcacattgtgcggacagaccccagactccacgagcccatgtattacttcctggctatgctttcactcactgacatggccatgtccctgcccaccatgatgtcacttttcagggtgttgtggtctatttcccgagaaatccagtttaatatttgcgtggtccaaatgtttctgattcatactttttccttcactgaatcatctgtgctcttggccatggcccttgaccgttacgtggctatctgccatcccctgcgatatgctaccattctcacgccgaaacttattgccaagattggaactgctgctctgctcagaagttctattttgataattccacttatagcccgtctagccttctttcccttctgtggctctcatgttctttctcattcctattgtttgcatcaggacatgattcgcctggcttgtgctgacatcagattcaatgtcatatatggactagtactcattactttgctgtggggaatggactccctgggcatttttgtatcttatgttttaatccttcactcagtgttaaaaattgcatcccgtgagggtaggcttaaggcactcaacacatgtgcatcccatatttgtgctgtgctaattctatatgtgcccatgataggattgtctattgtccatcgttttgccaaacattcctctcccctcattcatatcttcatggctcatatctacttattggttccaccagtacttaacccaatcatctacagtgtgaagaccaaacagatccgtgaaggaatcctccatttgctttgttctccaaaaatcagttctattacaatgtag

SEQ ID NO: 29 - DNA, 951 bp, Mus musculus
  MOR22-1
atgccccatctcaacagcaccatcttcaggccttcagtgctgactctgactgggattcctggcttggagtctgtgcagttctggattgggattcctttctgtatcatgtacatcattgcacttttggggaattctctactcctagttgtcatcaaagttgagcgaagcctccatgagcccatgtacctctttctagcaatgcttggagcaacagatatttctcttagcacttccatcttaccaaaaatgctaggtatattctggtttcacctttcaaccatatactttgatgcctgcctcttacagatgtggctgattcacaccttccagggtattgaatcaggcatcttgtttgccatggcaatggaccgttatgtggcaatctgtgatcctctaagacatgcatccatctttacccagcgactcctcactcaaataggagtaggagtcacactcagagcagccctgtttgtagctccatgtctctttctcatcaaatgcaggttgaaattctactggaccactgttgtttctcattcatactgtgagcatatggccattgtgaagctggcagcagaagatgttcatgtcaacaagatctatggtctatttgtggctttcagtatacttggactagacataattttcatcacactttcctacattagaatatttataactgtctttaagctccctcaaaaggaagcaagactcaaagcctttaatacatgcgttgcccatatttgtgtcttcttggagttttaccttctggccttcttctccttttttacacataggtttggctaccatgttccatcttacattcacattctcctgtccaacctttacctacttgtcccacctttgctcaatcctattgtttatggtgtgaagaccaaacagattcgagatcaagtgtccaaaattttgtattgtaattattcttattga

SEQ ID NO: 30 - DNA, 957 bp, Mus musculus
  MOR34-1
atgtctggagccaacagctccagcctgactccagaattctttatcctgaatggtgttcctgggctggaagatgcacatgtctggatctctctgccattctgcttcatgtacatgattgctgtagtggggaactgtgggcttatctacctcattggccatgaggaggctctgcaccggcccatgtactacttcctggctttactttccttcactgatgtcaccttgtgtacaaccacagtgcccaatatgctgtgtatattctggttcaatttcaagaagattggatttaattcctgccttgtccagatgttctttgtccacatgttgactggaatggagtctggtgtgctcatgctcatggccctggaccgctatgtagccatctgctatcctctacgatatactaccatcctcacaaaccctgtgattgccaaggctggtcttgcaacattcttaaggagtgtaatgctcatctttccattcactctcctcaccaagcgcttgccctattgcagaggcagtcttatcccccacacttactgtgaccacatgtctgtggccaaggtatcctgtggcaatgccaaggtcaatgcaatctatggcctcatggttgctctattgattggtgtgtttgacatttgttgtatctctgtgtcttacactatgatattgagggcagtggtgagcctgtcctctgctgatgctcgtcacaaggccttcagcacctgtacatctcacatctgtgctattgtgatcacttatgtgcctgccttttttacttttttcactcatcgttttggaggacacactattccccaccatgtccacatcatagtggctaacctctacctgctactgccccctaccatgaacccaattgtttatggagtcaagaccaagcagattcgggaaagtgtaatcaagtttttacttggagataaaatgggcattacctag

SEQ ID NO: 31 - DNA, 954 bp, Mus musculus
  MOR32-1
atgcccaacatcaacctactacagaatgcccccagtaatatcactgaggctcaccctctttctttcctgttgctggggattccggggctggaagctacacagttctggcttggttttcccttctgtgtcgtgtatctgaccgctcttgttggaaacctcatcattctgtttgttatatggactgacaggacctttcatcaacccatgttctactttctggctatgctgtctgtgattgacttaagtctctctactgctaccatccccaagatgttgggcatcttctggttcagcctccaggagctgtgctttgcgtgctgtgttgctcaagtcttttttatccattttttcacagtcatggagagcatcgtactcctcgccatgggctttgatcgctatgtggctatttgcaaccctctcaggtacaccacaatcctcaccaacagaatcatcgttgtgattgctgtcctcgtggttatacgaagcctgtgtatgattgtccccataatttttctcctcctgaggctgccttactgtggacatagaattatcccacatacctactgtgagcacatgggcgtggcgcgactagcctgtgccagcatcagagccaatatctactttggtcttgggaatatttcaattttgtttctggatgtgtttcttattatcgtttcctatgctaggatcttatatgccgtctttcatcttccttctcaagatgctcgcctaaaggctcttaatacgtgtagctcccatatctgtgtcatcttagccttctttggcccagctcttttctccttccttactcaccgctttggtcacaacatccctcagtatattcatatcctcctggctaatctctatgtagtcatccctcctgccctcaacccagtcatttatggaatcaggaccaagcagatccagcagagggtgaagaatctttttgtttaa

SEQ ID NO: 32 - DNA, 960 bp, Mus musculus
  MOR17-2
atggcaccgtcaaattccagtgtcagtgtgtcctccacattctatctcacaggtatccctggctatgaggaatttcaccactggatttccatcccattctgccttatctacattattggggtaacagggaactgttccatcttgcacattgtacgaactgaccccaaactccacgagcccatgtattacttcctggctatgctttcgctcactgacatggccatgtccttgcctgctatggtatcacttttcagggtgttgtggtctatttcccgagaaatccagtttaatatttgcgtggtccaaatgtttctgattcatactttttccttcactgagtcatctgtgctcttggccatggctcttgatcgttacgtggctatttgccaccccctgcgatatgctacgattctcacgccgaaacttattgctaaaattggaattgcagccttacttcggagtgctattccactcattcctctcctggttcgtctagcattcttttccttctgccgctcccatgtcctttctcattcttattgtctgcaccaggacataatccgccttgcctgcgctgacatcaggtttaatgttatatacggaatggtggtgattcttatgctgtggggaatggattctttgggtattttaataacttatgttttcatccttcactcagtgttaagaattgcatcccgggagggtaggcttaaggcactcaacacatgtgcatcccatatctgtgctgtgctcattctatatgtgcccatgatagggttgtctatcgtccaccgttttgccaaacattcctctccctttgttcatatcttcatggctcatatttacttaatggtgccaccagtgctcaacccaatcatctatagtgtgaagaccaagcagatccgacaaggaatattccatttgatctgtccccacaaaatcaattcttctgcaatgtaa

SEQ ID NO: 33 - DNA, 954 bp, Mus musculus
  MOR18-1
atggtgggcttcaatagcaatgaatccagtgccacatatttcatcttaataggccttccaggattggaagaggttcagttttggctggctttccctttgtgttccctctaccttattgctgtgctaggtaacttgacaatcatctacattgtgaggacagagcacagcctgcatgagcccatgtatatctttctttgcatgctttctggcctagacatcctcatttccacctcatccatgccaaaaatgatggccatcttttggttcaattccactaccatccagtttgatgcttgtctggtacagatgtttgccatccattccttgtctggcatggagtccacagtgctgctggccatggcctttgaccgctatgtggccatttgccatcctctacggcatgccactgtgctgacattgcctcgtgttgccaagattggcatggctgctgtggtcaggggtgcagtactaatggcacccttacctgtcttcatcaaaaggttgcctttctgtcgttccaacatcctttctcattcctactgcctacaccaagatgtcatgaagctggcctgtgctgacatccgtgtcaatatcatttatggactcattgtcatcatctcagccattggtttggactcacttctcatttccttctcatatttgctcatcctcaagactgtgttgggcttgacacgtgaagcccaggcaaaagcgtttggcacttgtgtttcacatgtgtgtgctgttttcatcttctatgtgcctttcattggattgtcgatggtgcaccgtttcagcaagaggcgtgactctctcctgcctgtcattatggctaacatctatctgctagttcctcctgtgctcaaccccattgtctatggagtaaagacaaaggagatccggcagcgcattcttcgtcttttcctcgtgaccacacacacttcagatcactag

SEQ ID NO: 34 - DNA, 945 bp, Mus musculus
  MOR14-2
atgccatccttcaacgagagcactgcctacccaccagtcttcttcctcactggcattcctggtcttgagacctctcacacctggatctccatccctttctgttgtctgtatgccattgccatctctgggaacagcatgatcctctttgtcatcatcactgagtcaagcctccatgaacccatgtactatttcctgtccatgctgtccttcacagacctaggtctatgcctttcaacattggtaactgtgttgggcatcttctggtttaatgttcgagaaattagcttcgatgcatgcattggccaaatgttctttatccatggctttacattcatggaatcttcagtcctcctggtgatggcctttgatcgatttattgccatctgtaacccactgaggtatgctatgatcttaaccaattctcgaatcattgcagtgggttttgcaatcataattaggggaaccaccgctcttgttcctttactcctgctcctcaagcgtctgtctttttgccggagtcatgtgctgcatcattcctactgcttccatcctgatgtgatgaagctttcatgttcagataccaggatcaatagtgcctttggcttggccattgtcatctctactgcaggcttggactctgtcttgatccttctctcctatgttctaatcatccattctgtcctttgcattgcatccaaggaggagcggaaaaaggcgtttggtacctgtgtctcccacctcagtgctgttgccatcttctacattcctatgatcagcctgtcattggtgcacagatttgggaaacatgcccctccctttgtgcacactctaattgccaatgtttatctgctcattcctccggtaatgaatcccataatctatagtgtgaaaaccaaacaaattcgcaaggccatgctgaaagtattttttgttaagccatcttag

SEQ ID NO: 35 - DNA, 951 bp, Mus musculus
  MOR14-3
atgctcatccttaataatacccattcccagcttccaaccttcctcctcactggtatcccaggcctgagagcagctcaggtctggatctccattcccttttgcctcctttacgtaattgccctttctgggaacagcatgatcctgctggtgatcgttcgtgagcagagcctccatgagcctatgtactactttctctctatgctctccatcacagacttgagcttgtctctctgcacactttccaccacccttggtgtcctctggtttgaagctcgagagatcaatttaaatgcgtgtattgcccagatgttctttctccatgggtttactttcatggaatccggagttctgctggccatggcctttgatcgttttgtggctatctgtgatccactaagatataccactattcttaccaatgccaggattgcccagattggcacaattgtgttgataaggaatgttgccgtcatgttgccagttgtgctctttgtcaagaggttgtccttctgcagttctctggttctttcacattcatactgctaccatgtagatgtcatccagctctcatgtacagacaacagaatcaatagcgttcttggtctgtttgcactattctctactacagggtttgactgcccttgcatcttgctgtcctatgtactgatcatccgatctgtcctcagcatcgcttcctctgatgagcgacagaaagccttcaatacatgcatatcccacatcagtgctgttgccatcttctacattcctctcatcagcttgtctcttgtacaccgctacggccattcagcacccgcctttgtccacaccgtcatggccaacgtcttcctgctcatcccgcctgtgctcaaccctataatctacagtgtgaagacgaagcagattcgaaaggctattctcaaggtgttaaatcagaaacaaaaccagctttaa

SEQ ID NO: 36 - DNA, 942 bp, Mus musculus
  MOR6-1
atgtctgtcatcaatgattccagcctgtaccctcgattccttctgactggtttcccaggccttgaaactagatatggcctcatttccatccctatatttttggtttatgtcacttctattgcagggaacattaccatcttattcattatcagaactgagtcttccctccatcagccaatgtactactttttgtctatgctggcactcactgacctgggcctctccaccacgaccttacctaccatgttcagtgtgttttggttccaagcccgggagatcccctttaatgcttgtctggttcagatgtacttcattcatgttttctcaattattgagtcagcagtgttgttggccatggcatttgaccgctttgtagcaattcgggaacctctgcgctatgcagctattctaaccaatactgtcattgttggaattggcttggcaattgctggaagagctttagccctggtctttccagcctccttcctcctgaagaggcttcagtatcgggttatcaatatactctcctacccattctgcctgcaccaagacctaataaagacaacggtatccagccgctgggtcagcagcatttatggcctcatggtggtcatcttctcaatgggactggattctttgcttctcctcctctcctatatcctcatcctgggtactgttttgagtatagcctccaaagcagaaaggataaaagcactcaacacttgcatttcccacatctgtgctgtacttactttctatacaccaatgattgggctatccatgatccgtcgctatgggcagaatgcttctccaattgtccacgtgatcatggccaatgtatacctactggttcctcctctcatgaaccctattgtctacagtgtgaaaactaagcagattcgtgacagaatcctgaggaaattaaagaaacaaaaagtttag

SEQ ID NO: 37 - DNA, 957 bp, Mus musculus
  MOR10-2
atggcagatcataaccactctcagtcccagcatctgtactttatcttaactggaatccctggacttgagcagaagtattactggatggcattcccattgggcgctatatatgtcattgcactctttggaaatggtgtcatcatctctacaatcaagtctgaatcttctctgcatattcccatgtactactttctgtgtatgctagcatttgcagatatggggctcaccctttgtactctgccatctatgctaggcatattctggtttaattacaaattcattacttttgatggttgtcttgttcagatgtacttcattcacaccttctcagccattgagtcaggagtgctagttgcaatggccattgatcgggtcatagcaatctggagccctcttagatatggcaccattttaaccaatggtgtggtctgtaaaatagggatgctcatcttgtcaagagcagtctgtgtggtcttccctgtgccttttctcatcaagaggctccctttttatcgctccaacatcctctcccactccttctgcctccatcaagatgtcatgcgccttgcctgtgccagcacccgtgtcaacagtctctatggccttatagctgtcatctttaccaagggttctgattccctttctatcctcatctcctatgtgttcatacttcgcacggtgatggctattgcctctggggagggccggctgaaggctctcaacacctgtgtgtcccacatctgtgctgtacttatcttctatgtgccattgattggggtgtcagtcattcatcgctttggaaagcacctgtcgccactgactcatgccctcatggcaaatgcctatcttcttgtcccccctgtgctaaaccccatagtttatactgtgaagaccaaggaaataagaaaaaagattatccagatatttattcgaaccaagattacaacagagggttaa

SEQ ID NO: 38 - DNA, 945 bp, Mus musculus
  MOR30-1
atggtggcttcaagtaacagctcttcccatcccctgttcttcatgttgcttggaatcccagggttggagaattatcaattttggattgcctttcctttctgtgttatgtatattgtggcactgactggaaatatcaccatcctatacataatccgaattgaccacaccctgcatgagcccatgtacctcttcctggccttgttggctatcactgacctggtcctgtcctcctccacacaacctaaaatgctggccatactatggtttcacagtcatgagattgaatacaacgcctgcctcatccaggtgttcttcatacatgccttttcttctgtggagtctggggtgctcatgaccatggccttggaccgctatgtggctatctgcttcccactccgacattccagcatcctgaccacatctgtagtcattaaactaggggcagctgtgatggtgagagggctgctgtgggtgagccccttctgctttatggtctccaggatgcccttctgccccaacaaggtcattccccagtcctactgtgagcacatggctgtgctcaagttggtatgtgctgataccagagtcaatcgtggatatggactctttgtggctttctctgtggttggctttgacataattgtcatcagtgtatcttatgtgatgattctgagagctgtgctgaggttgccctcaggtgaagctcgcctcaaagcttttggtacatgtgcttctcatgtctgtgttattttggctttctatatcccagccctttttaccttcctcacccaccgctttggccaccacgtgccacgagttgtccatatcatgtttgctaatttctatctgcttgttcctcccatgctcaaccctattatctatggagttagaaccaaacagatcagggacagggtcatccgaggattcaggagaaaagacccttga

SEQ ID NO: 39 - DNA, 960 bp, Mus musculus
  MOR14-4
atgctacaaatgcaggacaacacagaattcctaagcaacttcacatcgaaattatcaaccttcttgttgactggcattcctggactagagtctgctcacggctggatctccatccctttctgttgtctttatgccactgccctctctggcaacagcatgatcctcttcatcattgtgacccagcatagcctgcatgaacctatgtactatttcctctccgtgctctctgccactgacctgggtttgactttttctacaatgtcaaccaccttgagaatcctgtggtttcaggcaaatgaaatcagtctagatttatgcattgttcagatgttttttctccatgggttcacatgtacagaatctggagtgttagtggctatggcttttgatcgttatgtagcgatctgcaaacctcttagatatactatgattcttactaattctagaatcattcagataggtttcctagtgataatgcgcactctacttttaataattccactacttctgctccttaagcctgtctctttctgtaaaaggaataccctctcccactcctactgttattatccagatgtgattaagttagcatgttcagacactcgggcaaataacatctgtggactagttgatctcattctgacgacagggctagatattccatgcattgtcttatcttatattctgatcattcgttctgtcctcaatattgcctcatctgaagaacgacacaaggccttcagcacttgtgtgtcccacattgcagcagttgcagttttctacatccctatgtttagcctgtctctggtgcatcgctatggtcggtcagtgcccaaggtagtccatacaatgatggccaatgtttatcttcttttgccccctgtgctcaaccccatcatctacagtgtgaaaacaaagcaaataagaaaggctattcttagtttgctctttgcaaaatga

SEQ ID NO: 40 - DNA, 951 bp, Mus musculus
  MOR14-5
atgtcaaccttagagaacaccacagcttcttccatcattttcctgctcactggtatgcccgggctggaagccttccacacctggatctccattcccttctgctttctctatgcaactgccctgtcagggaacagcctgattctcttcgccattatcacccagcccagcctccacgagcccacgtattacttcctctccatgctatccaccactgacctcgggctctccatctccactctggccaccatgctggggatattttggctcaatgccagggagatcagcttcaatgcctgcttgtcacagatgttcttcattcagctcttcactgtcatggaatcctcagtgctgttggctatggcttttgatcgttatgtggccatctccaaccctcttagatatgcttcagttttaactgatgttaaaatagtagtaattggagtagcaatcattactcggggaactctaatccagactccccttgcagtgctcctgaaaagattgtccttctgcagcagccatgtgctccaccactcctactgtttccaccccgatatcatgaagctctcatgcacagacaccaggatcaacagtgcagttgggctcactgccctgatctccactgctggagttgactctgtcttcatcatcctctcctatgtcctgatcatcagaactgtcctcagcattgcttccccagaagagaggaagaaagccttcagcacgtgtatctcccatattggggctgtggctgtgttttatattccactgattagtctgtcctttgtccacagatttgggaaacgagctccaccatatgtccatactctgattgccaatgcctacctgctgatccctcctgtcatgaatcccatcatctacagtgtgaagacaaagcagatacggaaggctgtgctgaaagttctccattccagtatgacaaagagctag

SEQ ID NO: 41 - DNA, 969 bp, Mus musculus
  MOR21-1
atgtcaccattgtccgcccaagatacctcaaacatcagctcattaatggcccccacttttctgttagtgggtctgcctggcctggaagctgcaccatcctggtggtcagtgcctctcatcactatctaccttttctctgcctttggcaatggtacaatcctctggatcattgccctggagcccacattgcatagaccaatgtacttcttcctcttcttgcttagtgtgtctgatgttggcttggccaccgtgctaatgcccaccctgctaggcctggcctttgctgatgctcacactgtccctgcctcagcctgccttctacagatgttctttatccatgtcttttctgtcatggagtcctctgtcttgctcgccatggccttcgatcgggcagtagccatctgccgccctctccactacccagtgctcctcaccaatggtgtaattagaaagattgccgtagccattgctttccgatgcttgagtctccatctgcccctgccaatcctgttggctcgcatgccatattgccgtccacaggtcctgacacattcttactgcctgcacccagatatggctcgcctagcttgcccagaagcatggggtgcagtctacagcctggttgtggtactgtcagcaatggcactagaccctctgctgattttcttctcctatgggctgattgggagagcactgcaaggtgtgggatctgctgaggaccgctggaaggctgggcaaacgtgtgctgctcacctctctgctgtgcttctcttctacatacccatgattctcttggcactcattgacagattcaagctgccactccctccgcctgctcacacgctcctctcctatgtccacttcctgctccctccactgatgaacccagttctctacagtgtcaagatgaaggagattagagaaaaaattctcaagaggttactacccacaaaggtgggctgtgcttag

SEQ ID NO: 42 - DNA, 951 bp, Mus musculus
  MOR12-1
atgggagcagagaacaatgaaagtcttgacctcctatcaatcttcctaactggcattccaggactggaggcccaacatggctggctctccattccctttttcatcatgtacattgttgccattgtgggcaacagcctaattatgatagcagtgcagcaagagtcagctctccatgagccaatgtacctgttcctctccatgctggccatcaccgaggtgggagtctctgtgtccacactgcccactgttatgggcattctttggtttaatgcctacagaattgactttgatggctgtttggcacaaatgttcttcattcacactttctctggcatggagtcaggagtcctattggccatgagttatgaccgctttgtagccatctataatcctctgcgctatacagccattctaactctgcctcggatcatatccatgggtctgggtattacactaaagagtgttgcactcatggccccacttccaattcttttaaaacaactaccatattgtcacataaatattctctcccattcctattgccttcactcagacttgatccaactgccttgtgcagatactaggttgaatagcatcctggggttggccattgtcctggccacttttgggctggactcattactcattgtggtctcttatgggctcattctttacacagtgatgggtattgcttctggtgagggtcggaagaagaccctcaacacatgtgtgtcacacatctgtgcagtgcttatatattatgtgcctatgattggtgtgtctgtgatgcatcgtgttgccaagcatgcatcaccagtggtccacacacttatgtcgagcatctatctgtttgtgccaccagtgctcaatcctatcatatacagtgtgaaaacccgtccaatccaacagggaattgccaacttgttctcgtgcaagaagggatctatctga

SEQ ID NO: 43 - DNA, 954 bp, Mus musculus
  MOR26-1
atggtaggcaatattactcatcaacagattgcatctttcttcctggttggtattcctggcttggagaatgttcactgttggattggcatctctgtttgcctcctgtttgtcctgaccctgctggggaacagcatagtcattgctactatcaagctggagccaagtctccaccagcctatgtatttcttcctttgcatgctggcaatgaatgatatgtgtctttcctcttctgcagctctgaagatgcttggcatcttctggtttgatgcacactggatcaactttgatgcctgtctaacacaaatgtattttatccatacgctgtgcatcatggagtcagccatcctagtagccatggcatttgatcgctttgtggctatttgcatccctcttcattatgcatcaatcctgacaacatctatggtgattaaactaggtctagttggcctgatgagatgtgtgctcatggttttgccatgccctattctgattaagaggctgccttactatacaaaatatgtcatccctcatacttactgtgagcacatggctgtggtgaagttggcaagtgccaacactctcattaacagagcatatggaatttcagtggccctttcagtgataaccgtggacctaggactcatagcaacatcttatgtaaaaatcctccagtcagtgtttcggctctcttcccagaatgctcgttctaaagccctgggcacatgtgctgcacatgtctgcactatccttgtctcctatatacctgcactgtttagcttcctatctcatcgtattggcaagaaggtccctccaagcgttcacatcatttttgcaagcatgtaccttttagtaccttctgcggttaatccagtggtgtatggtgtcaagaccaagcaaattcgtgatcgagtgatagatcttttctttacacacaagaaattttctgaaaagtaa

SEQ ID NO: 44 - DNA, 960 bp, Mus musculus
  MOR9-1
atgtcctactccaatcattccagcacctcattctttcttactggcctccctggccttgagacagtgtatctctggctctccattcctttgtgcaccatgtacattgcctctctggcagggaatggcttgattctgtgggttgtaaagtcagagccctccctgcaccagcctatgtactactttctatctatgcttgcagttactgacctcggcctgtctgtctccacactgcctaccatgctgacgatctatatgatgggtgtcagcgaagtggcattagacatgtgccttgcacagctcttcttcatccatactttctccatcatggagtcatctgtgctgctgactatggcctttgaccgtgttgtggccatcagcagtcccctacactatgccaccatcctcaccaaccctcgggttgccagtttgggcatggtcattttggtacgaagcattggtctccacatccctgcccccatcatgctgaagaagctaccttattgccagaagcgtcatctttcccactcttactgcctgcacccagatgttatgaagctggcctgtactgacacccgcatcaacagtgcctatggcctctttgtggttctctctactctgggtgtggactctgtgctcatcgttctatcctatgggctgatcctctacacagtgctgtcaatcgcttccaagactgaacgcctcaaagccctcaacacctgtgtttcccacatctgttctgtgctgctcttctacacacctatgattggcctttctatgatccaccgatttggcaagtgggcatccccctgcagccgtgtgttgctctcttatcttcactttctcacacctccagtgctcaacccagttgtttataccataaagaccaagcagatccgacagaggatttggtgcatcttccggtgtggtggaagaagcattgggcatatccagggtcactaa

SEQ ID NO: 45 - DNA, 948 bp, Mus musculus
  MOR9-2
atggcaatttctaaacatagtaatgccagcagcttctttttcatattaatggatcttcctggactggagacttctcattgctggacagcaatacccatctgcttaatttacgttctttctgtgctgggcaacataaccataatgcatattgtcaagtctgtgcccagccttcacacacctatgtacctgtttctttccatgctgtcgatggctgacctgggcctctcagcttctacattgccttcaatggtagctgttttcctcctgggccagagaatgataggagctgtagcctgttttatgcagctcttcttcatccacacattttcagtcatcgagtcagccgttctcttggccatggcttttgaccgctgtgtggccatcagagagcctttgcgttatgctactattctcacaacaagacgtatcggggccattggactggctgtggtgatccgcagtgctgcccttcatctccctttgcctgtgctcctgggaagactgacgttccagcctgtcagtgctctgtctcattcgtactgtgttcatcccgatgtcctaaggctgtcctgttccagcacacttgtcaacagtggctttgggctctttgtcatgctctctacattggggatggatgcggtgctaattctcctctcctatgtgctgattttgaagacagtcctgagcattgcttctaatgctgagcggttgaaagccttcaacacttgcatttcccacatttgtgctgttcttttattttataccccactggtgagtctatctatgattcaccggtttgggaaaaagaaactaccagctcaggtatacatgcttctctcttatcttcatttccttatgcccccaatgctcaacccaattgtctacagtgtcaaaaccaaagagattcgagttcgcattctaaagatgctccatcctaagaaacattga

SEQ ID NO: 46 - DNA, 942 bp, Mus musculus
  MOR19-2
atgtctgaatttaataccacatttcagccttctgtcttcatcctcactggcctcagagggctggtgggtgcccgcctgtggttgggaccactcctgagcctgatgtacatcaccacattggcagggaactgtactgtaatttatttagtgaggactgaaaggagtctgcaggagcctcagtaccaatttttgtctatgctggctggggctgacattgtcttgtctgtctctacactgttctctgtgctaaaagtctttatctttgacctctatgaaattgcatttgacagttgccttgctcagctcttcttcatccatacatcttcttccatgggttcaggaatcttgttagctatggcttttgaccgctttgtggccatcagtcaccccctgcaatatacaacaatactgacgaactcacgagtcaccaggatgggactggcagcttttctgaggggtgtagcgctcatgatgcccttgcctatactgcttaagagattaccattctgcaaggggcagctgttgtcctactcctactgtatccacccaaatgtcatgaaactagcctgtggccaagtcaagatcaatattttctatggtcttgttttggttatattttcgtttggggtggacttcttgctcatagctatttcttatgctctgatatttcaagcagttatggggatcgcttctagagaaggtcagatgaaagcgctcaatacttgtttgtctcatatctttattgtctttatctactatggccctttgctggcaataactgtaatgcatcggatcagccgcagaagttctccaatagcacatgcagtcctgggaaatatctatctttttatgcccccaatgcttaacccaattgtgtatagcctgaagaccaagcagattcgctccgccttgagaaaatctttgaagatccagaggagatga

SEQ ID NO: 47 - DNA, 945 bp, Mus musculus
  MOR31-4
atgactaccttaaactacactgttgtaagtcacacagtcttccatttgttgggcatccctggcctagaggaccagcacatgtggatttccatccccttcttcatttcctatatcactgcccttcttgggaacagcctgctcatcttcatcatcctcacaaggcccagtctccatggacccatgtacctctttctctgcatgctggcaggggcagacatcgtgctctccacatccacagttccccaggccttgtccatcttctggtttcacgctggggagatctccctggatcgctgcatcactcagctcttcttcatccactccactttcatctctgagtctgggatcttgctggtgatggcgtttgaccgctacattgctatttgctacccgctgaggtacaccaccgttctcacaaactccctgattgggaaaatcggagtgggcatctttctgagaagttatggtacaattttccctataatatttcttctgaaaagactaactttctgcaaaaataatattattccacatacctattgtgaacacataggcttggctaaatatgcttgcaatagcatccgagtaaacatttggtatggattttctgtcctaatattaacagtggtcttagatgttgtgttaatttttgtttcctatgtgctgatcctccgtgcagtctttcgcatgccttcccaggatgctcgccacaaagctctcaacacgtgcggctcccatgtctgcatcattatcctcttctacgggcctgggatcttcacgacgcttacacagaggttcgggcgccacatcccaccccatatccacatcctgctggctaacgtgtgcattctggctccacctatgctgaaccccatcatttacggaatcaagaccaagcaaatccaggagcagatggttcatgtcttgtttacaaaccataagtga

SEQ ID NO: 48 - DNA, 957 bp, Mus musculus
  MOR185-1
atggcaacagggaatctcactcatgtcacggagttcatactcatgggggtaactgaccgtccagaactgcaggttccacttttctttctcttcttagtcatctaccttctgacagcagcagggaacctgggcatcatcaccctgacctccgtggactcacgcctgcaaactcccatgtacttcttcctcagacacctggcggtcatcaactttggcaactccactgtcattgctcctaaaatgctggtcaacttcttagtcagtaaaaaaaccaccttatactatgaatgtgccacgcagctgggaggatttctggttttcatggtatcagagatcttcatgctggctgtgatggcctatgaccgctatgtggccatctgcaacccactgctctacatggtggtggtgtctcgacgggtctgccttctgctggtgtttctcacttacctctttagctttgtcacagccattgttgtgacaccttgtgtgttctctgtttcttattgctcttccaatgtaatcaaccacttttactgtgacaatgtccctctgttagctctgtcctgctctgacactcaccttccagaaactgttgtattttttttctcagcgacaaacttgtttttctctatgattattgtacttatatcctatttcaacatagtacttgcaattttgaggatccgttcatctgaaggaaggaagaaagccttctctacttgtgcttctcacatgatggctgtcactgtgttctatggcacacttctcttcatgtatctacaaccacggactaatcactccttagacactgacaagatcgcttctgtgttctacaccctaataataccaatgttgaaccctgtcatctatagcttgagaaacaaggatgtaaagtgtgcattgaaagaattcctaaaaaatcccatgcaaaaaattcaatcttatatgaatttataa

SEQ ID NO: 49 - DNA, 945 bp, Mus musculus
  MOR13-2
atgggaggtgaagcccacaacagctctgggttgcctcccttcatcttgacaggactgccaggaatggagacctcccagcactggttgttcctgcttcttggtgtcctctacactgtttctatagtgggcaatgccctgatcctgttcatcatcaaggaggaagagagtcttcaccaacccatgtactatttcctgtctctgctgtcactcaatgacctgggtgtatctttctctacactgaccacagtcttgggtgtgttttgcttcctcttaagagagatcagttttaattcttgtatgtcccaaatgttctttatccatcttttctctttcatggagtctgggattctcttggccatgagctttgatcgctatgtagcaatctgtaacccactgcactattccacagtgctcactgatgcccgtgtgatgtggatgggtgtatgtgttttctttcgaagtttctgcatgattttcccattacctttccttctgaagaggttgcccttctgcaaggctaatgtgctttcccatgcctactgtctgcatccagacatgattcgcctgccctgtggggatattaccattaataatatatttggcttgttcatagtcatatctacctttgggctggattctgcactcattctcctctcttatgttctcatacttcgctctgtgctagctattgcctcccgggaagaaaggctgaagacactgaacacgtgtgtgtcacacctgtgtgctgtgctcattttctatgtccccatggtaggtgtgtccatggctgctcgctatgggaggcatgccccaaggtatgtgcacaccctgctctcacttgtttatctgtttgtgcctccaatgctcaaccctgttatttattccatcaaaactaaggagattcgtcgaaggctccacaaaatcctgctggggaccaagatttga

SEQ ID NO: 50 - DNA, 963 bp, Mus musculus
  MOR31-5
atgacatcatcaacatatttaaatcacaccaatctcagagacatctggtacactatgattgggatcccaggactagaagatgcacacatttggctctccatccccatcttttctatgtatatagtagctgttataggcaatacattcctaatattgctgatctctattgagcatagtcttcatgaacccatgtactttttcctaactatgttggccctggccgatatcttcttgtccacagtgaccattccaaaggtattagcaattttctggttccaagatagaagcatttcttttgctagctgtgtgtctcagatgtttttcctccacttcatctttgtgacagagtctggtatactactctccatggcatttgaccgttatgttgctatctgctatccactaagatacaccaccattctaaccccatctgtcatcatcaaaatgggcattgcagctgtgactagaagttttttcatctgcttccccctgatctttcttgtctataggctcacctattgtgggaagagcatcattcgtcactcatactgtgaacacatgggcattgccaggttggcctgtgacagcatcaaagtcaatatttactatggattgattgtagctctattttccatatttctagacgtagtacttattattgtctcatatgctcgcatactttgtgctgtgtacagaataccttcccaagatgccagactcaaagctctgagtacatgtggctcccatgtctgtgtcatcctgttattttatatgccagttttcttttcttctcttgctcaccgttttggaggtgacagcataccactgcatgttcacatcctccttgctaacctctatgttgttctaccaccctccctcaatcccatcatttatggagtaaagaccaagcaaattcaggagagagttgttcagttattttctttaaacaaggtaatttgttga

SEQ ID NO: 51 - DNA, 963 bp, Mus musculus
  MOR18-2
atgagttcctgcaacttcacccatgccaccttcctgcttattggtattccaggactggaggaagctcacttttggtttggcttccccctgctttccatgtatgctgtagcattgtttggaaactgcattgtggtcttcatagtgagaacagagcggagcctgcatgcacccatgtacctttttctctgcatgctggcagctattgatctggctttgtccacatccacaatgcccaagattctcgccctcttttggtttgactcccgggagattacttttgatgcctgtcttgcccagatgtttttcattcatactctctcagcaattgaatctactatcctgctggccatggcctttgaccggtacgtggctatctgccacccactgcgtcacgctgctgtcctcaacaatacagtaacagtccaaataggcatggtggctctggtccggggatccctattctttttcccactcccactactgatcaagcgactggctttctgtcactccaatgtgctctcccactcctattgtgtccaccaggatgtgatgaagttggcctatacagacacattacccaatgtagtctatggtctaactgccattctgctagtcatgggtgtagatgtcatgttcatctccttgtcctacttcctgatcatacgaacggttctgcaactgccttccaagtctgagcgagctaaggcatttgggacttgtgtgtcacacattagtgtggtcctggctttctatgtaccactcattggtctgtcagtggtgcaccgttttggaaacagcctggatcccattgtgcatgttctaatgggggatgtctacctgctgctgcctcctgtgatcaatcccatcatctacggtgctaagaccaaacagatcagaacacgggttctggctatgttcaagatcagctgtgacaaggacattgaagctgggggaaacacgtga

SEQ ID NO: 52 - DNA, 990 bp, Mus musculus
  MOR27-1
atgtccaacaccataagccagaccatggagtctcctaatcacacggacttggatccttctatcttcttcctcttgggcatcccaggtctagagcaattccatatgtggctctcacttccagtgtgctgtctgggcactgccacaatcgtgggcaatataaccatcctggtcgttgttgccactgagccaaccttgcacagacctgtctacctcttcctgtgcatgctctcaaccattgatttggctgcctccttctccacagtaccaaagctactggctattctctggtgtggagctgggcatatctctgcctctgcctgcctgacacagatgtttttcattcatgccttttgcatgatggagtccacagtgctgttggccatggcctttgatcgctatgtggctatctgccatccactccgctactctaccatcctcactgacaccatcattgctcgtattggggtagtagctatgatgagaggctccctactcatgcttccatgtcccttcctcattggtcgtctgagcttctgccaaagccacgtgattccacacacatactgtgagcatatggctgtggtgaagctggcctgtggagacaccagacctaatcgtgtgtatgggctgacagccgcactgttggtcattggagttgatttattctgcattggtctttcctatgccctcattgctcaagctgtttttcgactctcatcccaggaagcccggtccaaagccttaggtacctgtggctcccatgtctgtgtcatccttatctcttacacaccagccctcttctcctttttcacacaccgctttggccaccatgtcccactccacattcatattcttttggctaatgtctatctgcttttcccaccggctcttaaccctgtggtatatggagtcaagactagggagattcgtgaaagggttgccaaggtgtttcagtggggacagggaacaaggctcaagatatctaagtaa

SEQ ID NO: 53 - DNA, 954 bp, Mus musculus
  MOR33-1
atgatgctctctgctgctatccccaatggaactgccttccaccctcccacatttgttttgcttggaatccctgggatgcaggatcagcatgtttggattgctattcccttctgctccatgtacatccttgctctggttggaaatggtaccatcctctatatcattataacagacagggctctccatgagccaatgtacctcttcttgtgtctgctttctatcactgatctggttctctgttcaacaacattgcctaaaatgctggcaatattctggctcagatcccatgtcatttcctaccatggctgcctcactcagatgttttttgttcatgcagtctttgccacagagtcagctgttctgctggccatggcttttgatcgatatgttgctatctgcagaccactccactatacatccatcctcaatgctgttgtaattgggaagattggcctggcatgcgtgactcgtggccttctctttgtcttcccctttgtcattctcattgaacgtttacccttctgtggacatcatataatccctcacacttactgtgagcacatgggcatagccaagctcgcctgtgccagcatcaagcctaacaccatctatggtcttactgtagcactttcagtcactggcatggatgtggtcctcattgcaacctcctacatcctgattctgcaggccgtgctgcgactgccctcaaaggatgcccagttccgagcattcagcacatgtggagcccacatttgtgtaattcttgtcttctatatccccgcattcttttcatttttcactcaccgctttggtcaccacgtgcctcctcaggtacacatcatacttgcaaatctttatctccttgtgcctcctgttctcaaccccctagtctatggcatcaataccaaacaaatccgcctgagaatacttgacttttttgtaaagagaaggtga

SEQ ID NO: 54 - DNA, 957 bp, Mus musculus
  MOR11-2
atgatctcctcaaaggcttttgtcaatatcaccttcttccagccacaatctttcctgatgactggcataccaggactagagtttgctcatggctggatctccatcccattctcttccatgtacactgtggcactcactggaaactgcctcatcctcctggctgtgaggaggacccatagcctacaccagcccatgtactactttctgtccatgctagccctaagtgatgtgggtctcagcttgtccacattgccttccaccctggctgtgctctggtttgactatcgtttcatcgacttcaatgcctgtctgatccaaatgttctttcttcatttcttctctgtggtagagtcctcagtcctcttggccatgtcatttgaccgctttgtggctatctccaaccctctgcgctatgcatctgtcctcactaacaatgtcatcatcaggattggggtggccattacaacccgagctactttgtccctcttaccattgcccttcttgctgaagaggctgaactactgccctggcaagatcctcctgtctcactcattctgtttccatgctgatgtcatgaagctggcctgtgctgacattactgtcaacatcctatatggactctatgtggttctgtccacagtgggtatagactccttgcttattgtcatgtcctattccttgattcttcacacagtcatggggctagcctctcccagggagcgtgtccggaccctcaacacatgtgtttcccatatcttggctgtcctggtcttctacattccagtcataggtgtgtccatgatccatcgttttggaaagcacctgcctcacattgttcatgccctggttgcgtatgtgtaccttgtggtgcctcctgtgctcaaccccatcatctacagtgtcaagtccaaacccatcaggggagccatgttcagagtgctaagtaggaaaggctaa

SEQ ID NO: 55 - DNA, 939 bp, Mus musculus
  MOR13-3
atggcgctgttcaatgtcactcaccctgcctcctttctcctgactggtatccctggtctggagagcctccacccctggctggcaggacccctttgtgtgatgtatgccgtggccctcggggcaaatactgtgattctgcaggctgtgagagtggagcccatcctccatgctcccatgtactatttcctgtccatgttgtctttcagtgatgtggccatgtcaatggccacactgcccaccgtgctgagaaccttctgctttgatgcccgcagcattgcttttgacgcctgtctagtccagatgttcctcattcattctttctcgatgatggagtcagggattctgctggctatgagttttgaccgctatgtggccatatgcaatcccttgcattatgccactgtcctcaccaatgaattcattgctgggatgggcttagctgtgactgctcgaagcttcatcacccttttccctctgcccttcctcatcaaaaggctacctatctgcaaatccaatgttctttcccactcctactgcctgcacccagacatgatgaagcttgcctgtgctgacatcaccatcaacagtatttatggactctttgttcttgtgtctacctttggcatggacctgctttttattttcctctcctatgtgctcattctgcgttctgttatggccattgcttctcatgaggaacgccttaaagctctcaacacatgtgtatcacatatcttggctgtgcttgcattttatgtgccaatgataggggtctctacagttcaccgttttgggaagcatgccccacgatacatacatgtcctcatgtccaatgtctacctctttgtgcctcctgttctcaaccctctcatttacagtgccaagacaaaggagatccgccgtgccatattccgcatgtttcgccgtatcaaactgtga

SEQ ID NO: 56 - DNA, 930 bp, Mus musculus
  MOR139-1
atggagccaagaaacaatactcatattttagaattttttctattgggattttcacaggacccaaacttgcagcctgttatatgtggccttttcctctccatgtacttgatcactgtagttggaaacttgctcattattctcaccatcatctcagatgccaacttgcatacacccatgtacttttttctctctaacctgtcatttgtggatatctgctttgtttccaccactgtcccaaaaatgcttgtgaatattcaaacaaagagaaaatccattagctatgcagattgcatcacccagatgtacttttttctgatttttgtggaattggacaacttcctcctggctgtaatggcctatgaccgttatgtggccatctgccatccactgcattatactggtatcatgaatcgcagactctgtggatttttggttcttgtatgctggattgtgagtgttctgcatgccttgttacaaagcatgatggtgctgcggctgtccttctgcacagacttggaaatcccacacttcttctgtgaattgaatcaggtggcacagctaacctgttctgacacctttctcaatgatgtggtcatgtattttgcacttgttttattagccattgttcctctgtttggcatcctttactcttactccaagatagtatcctccatacgagcaatgtccacagttcaggggaagtataaagcattttccacctgtgcatctcatctctccgttgtctccttattttacttcactggtctaggagtatacctcagttctgcagtaagtcacagctcacaagcaagtgcaacagcctctgtgatgtacacagtggtgactcccatgctaaaccctttcatctacagcctgaggaataaagatgtaaaaggagccctgaagaggctcttaggggtaaaactatga

SEQ ID NO: 57 - DNA, 939 bp, Mus musculus
  MOR32-2
atgccctctaataatgaaactgcttcacacccctctctcttccatctgctgggcattcctgggctggaagctttccatatctggatagcctttcctttctttgttgtttatctgatagcacttgtggggaatttcacaatcctctgtgtgatcaagaatgaacagagtcttcaccagcccatgttctactttcttgccctcctctctttcattgatcttggcctctctacttccaccattcccaagatgctgggtatcttctggttcaaccttagggagataagctttgaaggctgcctcatccaaatgttcttcatccacacttacacaggcatggaatctgttgtactcctggccatggcaattgaccgttttgttgccatctgttacccacttaggtatacctctgttctcaccaacaaagtggtggctgtcatggcatcggttgtaatagggagacctgtccttcttgtcatccctttttgtcccctcctaaaacgcctgcccttttgtggacactatattattcctcatacctactgtgaacatatggggatagcacgtctagcctgtgctaacataaggataaacatcatctatggcttattcaccattgctgctctgatctttgatttaattctcattgctttctcctatgcttggatcctacaggctgttttccgccttccttccagggatgccagacacaaagcccttagcacatgtggttcccatgtctgtgtcatcttagccttttacacaccagcatttttctcttttatgacccataggtttggtagaaatgttcctcgttatattcacatcctcttggccaatctctatgtggttgtccctccttgtttaaatccagtcatttatggagtgaggacaaaacaaattagggagggagtcttaaaaatatttgtaaagaaagaatag

SEQ ID NO: 58 - DNA, 954 bp, Mus musculus
  MOR35-1
atgattttttctaataattctcatctccttccacatactttcttcttgactggcatcccaggactgactgctgcccatgtttggatatcccttcccttctgcttcatgtttgtcctgtcactaactgggaatgcagtcctgctttctctcatctggatagaacacaggctccaccagcccatgtttttgtttcttgcaatgctctcttttgttgatctggtcctctccctttccactctgcccaagatgctggctattttctggtttggtgccacagccatcagctcctatgcctgtctgtcccaaatgttcctcatccatgcattctctgccatggagtcaggggtgctggtggccatggccttggaccgatttgtggctatctgtaacccattgcattatgcaaccatccttacgcctgaagttgttgccaagattggaggcctggtggcactgcgaggtgtgggtttaactatcttctttccaagcctggcttgtcgactgtcttattgtggttcacacacaattgcttacacttactgtgaacacatgtccgtggtgaagctggcttgtggggccataactgtggacagtctctatgcttttgctgtggcaatctttcttggtgtgggggatatggcctttattgcctactcttatggacagattgtgaagacagtgatgcgttttccttctccagaggcacgtggcaaagcaggaagtacatgcacagcccatgtctgtgtcatcctcttcttctatggacctggctttctttctgtggtcatgcagcgctttgggccatccacagcttctgctgccaaggtcatccttgccaatctctacttgctttttccccctgctttggaccccattgtatatggggttaagaccaaacagatcagagagtgtctgttcacaattataggttccaagaagattgaacccacttga

SEQ ID NO: 59 - DNA, 939 bp, Mus musculus
  MOR270-1
atggagaaatggaatcagagctcaagtgattttactctgttaggactgcttccacaaaaccaaacaggcctgctacttttgatgctcatcatctttgtcttctctctggctttgtgtggcaactcaggaatgatccacctcattcgtgtggatccaaggctccacacccccatgtactttctcctcagtcagctctctctcatggacctgatgtacatttctaccactgttcccaagatggcatttaacttcctttctggccagaaaagcatctcttttctgggctgtggagtgcaatccttcttcttcctgactatggcatgttctgagggcttgctcttggcttccatggcttatgatcgttttgtggctatctgccatccccttcactatcccattcgcatgagcaaaataatgtgtctgaagatgatcataggatcctggatattgggctcaatcaactctttagcacataccgtctatgcccttcatattccttactgccattctaggtccattaaccatttcttctgtgatgttccagccatgttgcccctggcctgtatggacacttgggtttatgagtacatggtgtttgtgagcacaagcctgtttctcctactgcctttccttggtatcacagcttcctatggtcgggtcctttttgctgtcttccacatgcgctcaaaagagggaaagaagaaggccttcaccacatgctcaactcacttaactgtggtgacattttactatgcaccttttgtctatacctatcttcgacctaggagtcttcgctccccaacagaagataagattctggctgttttctacactatccttacccccatgctcaaccccatcatttatagtctgaggaataaggaggtcctgggggccatgacaagagtccttggtacttttccttcaactaaaccgtaa

SEQ ID NO: 60 - DNA, 966 bp, Mus musculus
  MOR147-1
atgtattccatcagattcaccatgaacatgaaatatataaaccaaacggttgtgtcaggattcattctcctgggactcacagatgataccaagctgcaacttattatcttcagtgtctttctttccatgtaccttgcaacagtcataggaaacctcctgattattctggccaccaactttgactctcatctccatacccccatgtacttctttctctctgttctttcttttaatgatatctttttagttacatgcactattccaaagatgctggtgaatatacaaacaggaaaccagaacatcacttatggaggatgtctgactcaggtctgctttgtcttggtgtctgttggcatggaaaattgccttcttgcagcaatggcctatgaccgctatgttgctatttgccatccacttaggtataggatcataatgaacccctatctttgtatcctaatggtagcattttctatgatagggagcatggcaaatgccctggtcaatggtctaatggtattacatctgtccttctgcacagaactcataatcccacatttcttctgtgaacttacacagattactaaacttgcctgttccaacactcttattgacaacatactaatatacatttcatcttgcatatttggtggtgttcctctttctggcatcattttgtcatattgtcaaattgcaaccactgtcttgagaatgtcatcatcagaaggaagatataaagcattttccacctgcgggtctcatctgtcagttgttttcttattttatggaaccggttttggggtctatatcagctcaacaattacagaatcatccaggaagagtgctgtggcttcagtgctgtattcagtagtccctcaaatgataaatccctttatctatagtctgaggaacagagacatgaaagaagccttgaaaaaactcatcagtaggatattatttcctctatga

SEQ ID NO: 61 - DNA, 936 bp, Mus musculus
  MOR256-1
atgggaactttcaatgccagtttagggaaaggcttcatattagtaggcttctctgatttccctcaactggaagttttcctctttgtctttattctagtcttttatctgctaactctccttggcaacaccaccatcattgctctctcaaggctggatgtcagattgcacacacccatgtactttttcctctcccatctttctttcctggacctgtgctacaccacaagcactgtaccacagcttctcattaacctctgtgggttggataggaccatcagctatggaggctgtgtggctcagctcctcattttccttgccttggtctccacagagtgtctgctcctgggggtcatggcctttgaccgttatgcggctgtgtgccgtccactgcactacacgaccattatgcaccctcagctgtgtcagggactggccatctcctcctgggtttctggccttgtgaactctgtgattcagacaggacttgttatggccatgcccctctgtagccatcggctgaatcacttcttctgtgagatgcccatattcctgaaattggcttgtgaagacactaatggaacggaggtcaagatgtttgtggcccgaacaataatcttgatctttcctgctgcactgattctgggctcctatggacacattgccagagcaattctgagaatcaagtcaatggctggacgaagaaaggcctttggaacttgtgggtcccacctcattgtggtttctctgttttacggctcaggcatatatacatacctccaacctatccacagatattcagagaacgagggaaagtttgttgctgttttttatactatactcacccccattctcaaccctttaatatatactctgaggaacaaggatgtgaagggggctctgtggaaagtacttgggaaaggcacagacttagtgtaa

SEQ ID NO: 62 - DNA, 936 bp, Mus musculus
  MOR256-2
atgggaagtttcaatacgagttttagacagggtttcttcttggtgggtttctctgatttccctcaactggaactccttctctctgtcctcatttccattttctactccctaactctctttggcaactccactatcattattctttcacaactggatgctcggcttcaaatgcccatgtacttcttcctctgccacctgtccttcctggacctgtgctataccaccagcattgtgccccagcttctgattaacctccagggatatgacagaaccataagctatggagggtgtgtggcccagctcttccttttccttgctttagccaccacagagagtgtgctcctggttgtgatggcctttgaccgctatgttgctgtgtgccgcccactgcactacacgaccatcatgcaccccgttctctgcctctcactagctattgtttcgtgggtaggaggattcatgaactctctaattcagacgagcctcatgatggcggtgcctctttgtggacatcgactgaaccacttcttctgtgagatacctagtctcctgaagttggcctgtgaggacacagaaggaacaggagccaaaatgtttgtggtccgagttgtattcttgatttttcccataacactaattctaagctcctatgcaaacattgctcaggcagtgctgaagaccaagtcaatggcagggtgcaaaaaggctctggggacttgtgggtcccaccttgtggtggtttctatgttttatggtgcagccatgtacacatacttacaacccaagggcacctattctgagagcaaggggaagtttgtggcccttttttatattattgtcacccccatgctcaaccctctgatctataccctaaggaacaaggatgtcaagggggctctgtggaaggtgctagggagagctactgacttgggatag

SEQ ID NO: 63 - DNA, 936 bp, Mus musculus
  MOR103-1
atggatgtggacaaccagacacgggtcaccaagttcattctggtggggtttcctgggagcttgagcatgagagcagctgtattcctgatgtttcttgtggcctatattctgactgtagctgaaaacgtgatcatcatcctactggtgcaacagaaccgaccactacacaagcctatgtacttcttccttgccaacctgtctttcttggagacctggtacatctctgttaccgtgcccaagctgctgttcagcttctggtccatgagtaacagcatttctttcactcactgtatgatacagctttacttcttcattgcacttatgtgtacggaatgcgttctcctagctgcaatggcctatgatcgttatgtggctatctgccgcccattacactaccccaccatcatgagccatggactctgtttccgcctagctcttggttcctgggtcattggctttggcatctctttggcaaagatctacttcatctcccgcctcagcttctgtggccccaatgtcatcaaccacttcttttgtgatatctctcccgttcttaatctctcctgcacagacatgtccattgcagagctggtggactttgtcttggctctggtcatcttcctctttccgctgtcaatcactgttttatcatacggatgcattctggccactgtgttacgcatgccaacaggaaagcagaaagccttttccacctgtgcttcccacctcgtggtggttaccatcttctactcagccactatttttatgtatgcccgaccccgagctatccatgccttcaacatgaacaaagttatttctatcttctatgccattgtgacccctgctctcaatcctttcatttattgcctaaggaaccgagaggtaaaagaagctctaaagaaattgatttattgccaggtcatccgatctgactag

SEQ ID NO: 64 - DNA, 951 bp, Mus musculus
  MOR101-1
atggaggctacaacatgcaatgggtcagtagatggctctaccgtcttctacctggtgggcattccttccctgccagagcccttctacctccctgtcttctttcttttccttctgttctacctgctcatcctggtggggaacgccctgatcctggtggctgtggtggccgagcgcagcctccacaagcccatgtacttcttcctaatcaacctctcggctctagacatcctcttcaccacaaccactgtcccgaagatgctgtccctgctcctgctgggagaccgcttcctcagtttccctgcctgcttattgcagatgtatctgttccaaagctttacctgctcagaagccttcatcctggtggtcatggcctatgaccgctatgtggctatctgccgccctctgcactaccccgtccacatgaccccacagacaaacactgcactggcagccagtgcctggatcaccgccctcctcctgcctgtcccagcagtgataaagacctctcagatggtatataatgacattgcctacatctaccactgcttctgtgaccacctggctctggtccagtcctcttgttctgacaccactccccagacgctcatgggcttctgcatcgccatggtggtgtccttcctccccctcctcctggtgctcctctcctatgtgcgaatcctgacgtcagtgcttcagatcaactccaaggaagggcgttccaaagccttctccacctgcagttcccacctcctggtggtgggcacctactactcgtccattgccatagcctatgtggcttaccgggctgacctgcccttggacttccacatcatggggaatgtggtctattcaattctcaccccaatcctcaaccctctcatctacactttgaggaacaaagatgtcaaagcggccattaccaaaattgtttatctcaaaggcatgatgtga

SEQ ID NO: 65 - DNA, 951 bp, Mus musculus
  MOR283-1
atggaaccctggaattctaccttggaaagtggattcatcttggtggggattctggatggcagtggctctcctgaactactctgtgccacagttacaaccctgtacatgttggcactgatcagcaatggacttctactcctggtcatcacagtggatgcccggcttcacgtacccatgtacctcctactgaggcagctgtctctcattgacctcctcttcacatcagttgtaactcccaacactgttgtggattttctgctcagagacaacaccatatcctttgagggatgtgcccttcaattgttctcagcaatgacattgggtggtgcagaggacctccttctggccttcatggcctatgataggtatgtggccatttgtcatcctctaaactacatgatcttcatgagtccaaaggcctgcaggctcatggtggccatatcatggatcctagcatctcttagtgccctaggtcacacagtgtacacaatgcacttccctttttgcatgtcccaggaaatcagacacctgctctgtgaggttcctccattgttgaaattggcttgtgcagacacatctcaatatgagctcatggtttatgtgacaggagtgatattcctattgctccccctctctgccattattacctcctactcactaattctattcactgtgctgcacatgccttcaaatgagggcaggaagaaagcccttgtcacctgttcctcccacttgactgtggttgggatgttctatgggggtgccactttcatgtatgtgctgcccagttccttccacagtcctaagcaagacaatatcatctctgtgttctatacaattgtcacaccagctctgaaccccctcatttacagcctgagaaataaggaggtgattggagctgttagaagagtactggggagacatattctgccagcacacgccactgtttag

SEQ ID NO: 66 - DNA, 948 bp, Mus musculus
  MOR256-3
atgtggatcaataatcagagctcagtagatgacttcatcttattgggattttctgaccggccttggctggagacacctctctttgtaatttttctggtggcctacatctttgccttatttggtaatatctccattatcctagtttcccgcctagacccccagcttgacagccccatgtacttttttgtctccaacctttctcttctggacctctgctatactacgagcactgtccctcagatgttggtcaaccttagagggcctgaaaagaccatcagctatggtggctgtgtggcccagctctatattttcttggctttgggctcaactgaatgtatccttctggccatcatggcctttgaccgttttgctgccatttgcagaccccttcactatcctatcatcatgaaccagaaacgatgcattcatatggccacagggacctggattagcggatttgcaaactctcttgtgcagtccaccctcactgtggtagcccccaggtgtggacagagggtaatagaccatttcttctgtgaagtcccagcccttttgaaactagcttgcactgacacaagtgtgaatgaagctgagcttaatgttcttggagctttgctgctcttggtgcctctcagcctcatcctgggtacctatgtgttcattgctcaagcagtactgaaactccgttctgctgagagtcgcaggaaggcatttaatacctgtgcttcacatctgctggtggtctccctcttctacttcacagctatcagtatgtatgttcagcctccctcaagctactctcatgaaaggggcaagatcatggctctgttctatggcattgtcacacctaccctcaacccattcatctacactttgaggaataaggatgttaaggctgccctgaggagggcactaacaaaggagttttgggtcaaggcaaggcaatag

SEQ ID NO: 67 - DNA, 969 bp, Mus musculus
  MOR31-6
atgattcatagcaacatcacccccatccaccctgcattttttgtgctagttggcatccctgggttggaggcttatcatacctggttgtctatacccctgtgcctcatgtatgtcactgcagtccttggaaacagcatcctgataatggtgatcatcacagaacggaaccttcatgaacccatgtattttttcctctccatgttggccatcacggacatcttactgtccaccacaactgtgcccaaggccctcaccatcttttggctccatgcccacaacattgcctttgatgcctgtgtcacccaagtcttctttgtccacacaatgttcgtgggggagtcggccatcttgttagccatggcctttgaccgctttatagccatctgtgccccactgagatatgcaacagtgctaacatggtccacagttgggaggattgctctagccattgtcatcagaagcatctgtattatctttcctgtgattttcttgctgaagcggctgccgttctgccgaaccaacatcgtcccccattcctactgtgagcacattggggtggcccgcttagcttgtgcagatataactgttaacatctggtacggcttctccgtgcccatcgtcatggtcattgtggatgtgattctcattgctgtgtcgtactcgctcattctccgagcagtgtttcgcttgccctcccaggatgctcggcacaaagctctcagcacctgtggctcgcacctctgtgtcatcctcatgttttacgttccatccttctttactttactgacccatcgctttgggagaaacattccccgacacgtgcatatcctgctggccaatctttatgtggtggtaccaccaatgctgaaccccattgtctacggagtgaagactaaacagatccgggagggtgtggtccactggttcttggacatcaagactctgtgttgttcttcacctttgggatga

SEQ ID NO: 68 - DNA, 933 bp, Mus musculus
  MOR34-2
atgtctgaagccaacagctccagcctgaccccagaattctttatactgaatggtatccgtgggctggaagatgcacatgtctggatctctctgccattctgtttcatgtacatgattgctgtggtggggaactgtgggcttatctacctcattggccatgaggaggctctgcaccggcccatgtactactttctaaccctgctctccttcactgatataaccttatgtaccactactgtacccaatatgctgtgtatattctggttcaacctcaagaagattggatttaaagcctgcctggcccagatgttctttgtgcataccttcacagcaacagagtctggcatgctaatgctcatggccctggatcgctatgtggccatctgctatcctttgcgctacgggaccatcctgaccaaccctgtgattgccaaagctagtcttgctactttcttgaggagtgtggcattcatccttcctttcactttcctcactaagcgcctgccctattgccgaggaaacctcatcccccatgcctactgtgaccacatgtctgtggccaagatatcctgtggcaatgtgaaaatcaatgcagtctatggtctgctggttgctcttgtggtttgtgcatttgacatattctgtatcactgtgtcatacacaatgatattgagagcagtgatgaacctgtcttctgctgatgctcgtcacaaggccttcagcacctgcacatctcacatctgtgctattgtgatcacttatgtgcctgctttttttaatttcttcactcatcgttttggagcacatactattccccaccacatccacatcatagtggcaaacctctatctgttattgcctgctaccatgaacccaattgtttatggagtcaagacccaagcagattcgggagagtgtaatcaaattttttag

SEQ ID NO: 69 - DNA, 957 bp, Mus musculus
  MOR34-3
atgtctggagccaatagctccagcttgaccccagaattctttatcctgaatggtgttcctgggctggaagatgcacatgtctggatctctctgccattctgcttcatgtacatgattgctgtggtggggaactgtgggcttatctacctcattggccatgaggaggctctgcaccggcccatgttctacttcctggccttactctccttcactgatgttacctggtgtactaccactgtgcccaatatgctgtgtatattctggttcaatttcaagaagattggatttaattcctgccttgcccaaatgttctttgttcatatgttgactggaatggagtctggtgtgctcatgctcatggccctggaccgctatgtagccatctgcaatcctctacgatatactaccatcctcaccaaccctgtgattgccaaggcttgtcttgcaacattcttgaggagtgtaatgctcatctttccattcactctcctcaccaagcgcttgccctattgtagaagcattcttatcccccatacttactgtgaccacatgtctgtggccaaggtatcctgtggcaatgccaaggtcaatgcaatctatggcctcatggttgctttattgattggtgtgtttgatatttgttgtatctctgtgtcttacactatgatattgagagcagtggtgagtctgtcctctgctgatgctcgtcacaaggccttcagcacctgtacatctcacatctgtgctattgtgatcacttatgtgcctgccttttttacttttttcactcatcgttttggaggacacactattccccaccatgtccacatcatagtggctaacctctacctgctactgccccctaccatgaacccaattgtttatggagtcaagaccaagcagattcgggaaagtgtaatcaagtttttacttggagacaaaatgggttttacctaa

SEQ ID NO: 70 - DNA, 951 bp, Mus musculus
  MOR22-2
atgatcaagttcaatggctcagtcttcatgccttctgtgttaacactagtggggatccctggcctggagtcagtgcagtgctggattggaattccattctgtgtcatgtacatcattgctatgattgggaactccctaattttagttataatcaaaagtgaaaagagcctccacatacccatgtacattttcttggctattttggcagtcacagacattgcccttagcacatgcattcttcccaaaatgttgggcatcttctggtttcacatgccacagatttcctttgatgcctgcctgctccagatggaactcatccactcattccaggccacagaatcaggcatcctcctggccatggctctggatcgctatgtggctatctgcaaccccctcagacatgctactatcttctctccacaactcaccacttgccttggagctggtgcattactgaggtctctcattaccacatttccattgatattgctcatcaaattttgccttaagtactttagaactaccattatctcccactcgtactgtgaacacatggccattgtgaaactggcagctcaagatatcagaatcaacaagatatgtggcctccttgttgcctttgccatcttagggtttgacatagtcttcattaccttctcctatgtgcgaatcttcatcacggtcttccagctgccccagaaggaggctcgattcaaagccttcaatacctgcattgctcacatctgtgtcttcctgcagttctaccttctggccttcttctctttcttcacacacaggtttggggctcacatacccccctatgtgcacatcctcctgtcagacctttacctgttagtcccaccttttctgaaccccattgtttatggtattaaaactaaacaaatccgtgaccaagtcctgaaaatgtttttctccaagaaacccctgtga

SEQ ID NO: 71 - DNA, 948 bp, Mus musculus
  MOR22-3
atgatcaagttcaatggctcagtcttcatgccttctgtgttaacactagtggggatccctggcctggagtcagtgcagtgctggattggaattccattctgtgtcatgtacatcattgctatgattgggaactccctaattttagttataatcaaaagtgaaaagagcctccacatacccatgtacattttcttggctattttggcagtcacagacattgcccttagcacatgcattcttcccaaaatgttgggcatcttctggtttcacatgccacagatttcctttgatgcctgcctgctccagatggaactcatccactcattccaggccacagaatcaggcatcctcctggccatggctctggatcgctatgtggctatctgcaaccccctcagacatgctactatcttctctccacaactcaccacttgccttggagctggtgcattactcagggctttcattcttgtatccccatccatactactcatcaaatgtcgccttaagtactttagaactaccattatctcccactcgtactgtgaacacatggccattgtgaaactggcagctcaagatatcagaatcaacaagatatgtggtctccttgttgcctttgccatcttagggtttgacatagtcttcattaccttctcctatgtgcgaatcttcatcacggtcttccagctgccccagaaggaggctcgattcaaagccttcaatacctgcattgctcacatctgtgtcttcctgcagttctaccttctggccttcttctctttcttcacacacaggtttggggctcacatacccccctatgtgcacatcctcctgtcagacctttacctgttagtcccaccttttctgaaccccattgtttatggtgttaaaactaaacaaatccgtgaccaagtcctgaaaatgctattctccaagaaacattag

SEQ ID NO: 72 - DNA, 939 bp, Mus musculus
  MOR33-2
atgagcgaaagtctcccagtcactctcttcctaactgggatcccagggctggagttcgcccacctctggattgccatccccttctgtgtcatgtatgtggttgctctgcttgggaatgctgccctcatccttatcattgggacagagagtgtgcttcacacacccatgtacctcttcctctgccttctctcactcactgacttggctctcagctccaccactgtacctaaaatgttggccattctatggctccattctaatgagatttcctttggtggatgcctcgcccagatgttttgtgtccactccatctatgctcttgagtcctcggttctccttgccatggcctttgatcgatatgtagctatctgcaacccactgagatatacaaccatcctcaaccatactgtcatagcccaaattatctttgctgggatagtccgtagtgtggctattgtctcccctttcatctttttgctgaggcgactgccctactgtggtcaccgtgtcatgactcacacatactgtgagcatatgggcattgctaggcttgcctgtgccaatattactgttaatattgtctatgggttgactgtagctttgctggccatgggcctggattccatcctcattgccatctcctatggcttcatcctccgggctgtcttccgtcttccatcccgtgatgctcaacacaaggctctgagtacctgtggatctcaccttggtgtcattctggttttctatatacctgctttcttctccttcctcacccatcgctttggtcacaatcgagttcccaagcatgtgcatatcttcctggctaacctctatgtgctggtgcctcccgtgctcaatcccatcatctacggtgcaagaaccaaggagattcggagtcggcttctaaaactgcttcacttggggaaggacttagtatga

SEQ ID NO: 73 - DNA, 939 bp, Mus musculus
  MOR31-7
atggttatgcacaacgtgagtagctacaacactggccccttcactctctcgggcatccctggacttgagcagtaccatgtctggatcagtatccctttctgctttatctatctcgtggccatcctgggcaacagcatccttctctaccttattgcagtggaacacagtcttcattcccccatgttcttcttcctttccatgttggccatgactgacctcatattgtctaccacctgtgtccccaagacccttagcatcttttggtttggtcctcaggaaatcagttttcctggatgtctgactcagttattctttttacactacagctttgtcttggactcagctatcttattggccatggcatttgaccgctatgtggccatctgttcacccttgaggtataccactattctcacacccaaaaccattgtcaaaattgctgtgggaatctctttccgaagtttctgtgtttttgtgccatgtgttttccttgtgaatcgcctacccttctgcaggacacacatcattgcccatacctactgtgaacacattggtgttgcccggctggcatgtgcagatatctccatcaacatctggtatgggttttgtgtccccatcatgacagtgattatagatgtgatcctcatagccatctcctacactctcattttatgtgctgtttttcgccttccctcccgagatgcacgccagaaggccctgagcacctgcggttcccatgtctgtgtcatcctcatgttctatataccagccttcttctccatccttgctcatcgctttgggcgaaatgtcccccgcacttttcatattatgtttgccaacctgtatgtaatcatcccacctgcactcaaccctattgtctatggagtgaagaccaagcagatccgggacaaagccattcttctgctcttccccaaatga

SEQ ID NO: 74 - DNA, 960 bp, Mus musculus
  MOR30-2
atgatgtattctctcatgttggcttcaaggaacagctcttcccactctacatttttcatcttgcttggaatcccaggactggagaattaccaattctgggttgcctttccattctgtgtcatgtatattgtggcagtgactggaaacatcaccatccttcacataatccgaattgaccacaccctacatgagcccatgtatctctttctggccatgctggctaccactgaccttgtcctgtcctcctccacacaacccaaaatgctggctatactctggtttcatgatcataagattgaatatcatgcctgcctcatccaggtgttcttcatacatgccttttcttctgtggagtctggggtgctcatgaccatggccttggaccgttatgtggctatctgcttcccactccgacattccagcatcctcaccacatctgcagtcatcaaactaggtgctgttgtgatggtgagagggctgctgtgggtgagccccttctgtttcatggtctccaggatgcccttctgccccaacaagatcattccccagtcctactgtgagcacatggctgtgcttaagttggtatgtgctgataccagagtcaatcgtggatatggactctttgtggctttctctgttgttggctttgacataattgtcatcagtgtatcttatgtgatgattctgagagctgtgctgaggttgccctcaggtgaagctcgcctcaaggcttttggtacatgtgcttctcatattggtgtcatattaaccttatatatcccagcccttttcaccttcctcacccaccgctttggtcaccatgtgccccgagttgttcacatcatgtttgccaatgtctatcttctagttcctcctatgctcaatcccatcatatatggagttagaaccaaacagatcagagacagggttacccgagggttttgtgtaaaaggttcatga

SEQ ID NO: 75 - DNA, 960 bp, Mus musculus
  MOR30-3
atgatgcattctctcatgttggcttcaaggaacaactcttcccattctacatttttcatcttgcttggaatcccaggactggagaattaccaattctgggttgcctttccattctgtgtcatgtatattgtggcagtgactggaaacatcaccatccttcacataatccgaattgaccacaccctacatgagcccatgtatctctttctggccatgctggctaccactgaccttgtcctgtcctcctccacacaacccaaaatgctggccatactctggtttcatgatcataagattgaatatcatgcctgcctcatccaggtgttcttcatacatgccttttcttctgtggagtctggggtgctcatggatatggccttggaccgctatgtggctatctgcttcccactcagacattccagcatcctgaccacatctgtagtcatcaaactaggggtagctgtgatggtgagagggctgctgtgggtgagccccttctgcttcatggtctccaggatgcccttctgccccaacaaggtcattccccagtcttactgtgagcacatggctgtgcttaagttggtatgtgctgataccagagtcaatcgtggatatggactctttgtggctttctctgtggctgtctttgacttagctgtcatcagtgtatcttatgcaatgattctgagagctgtgctgaggttgccctcaggtgaagctcgcctcaaggcttttggtacatgtgcttctcatattggtgtcatcttaaccttatatatcccagcccttttcaccttcctcacccaccgctttggtcaccatgtgccccgaattgttcacatcatgtttgccaatgtctatcttctagttcctcccatgctcaatcccatcatatatggagttagaaccaagcagatcagagacagagttacccaagcattttgtggaaaaggctcatga

SEQ ID NO: 76 - DNA, 954 bp, Mus musculus
  MOR32-3
atgatccttcccaatgacactcagtttcacccttccactttcttgttgctggggatcccaggactagagtctcttcacatctggattggatttcctttctgtgttgtatacatgattgctctcttaggaaacttaaccatcttgtttgtgatcaaaactgagagcagcctccaccaacccatgttctattttctggctatgttggctaccattgacttgggcctctcaacagcaaccatccctaaaatgcttgggatcttctggattaatcttagagaaatactctttgaagactgcctgatacagatgtttttcatccacaaattcacacttatggagtcaacagtcctcttggcaatggcttatgaccactatgtggccatctgtatcccacttcggtacagcaccattctcaccaataaggtcgtttctatgattggcattgctgtgctagtgagggcaattatctttgttattccatttatatttctaattttgagactgcccttctgtgggcatcacatcattccccatacctactgtgagcacatgggtcttgcacggctgtcttgtgcaagtgtcaaggccaatgtaatttatggcttatgtgccatatgtaatctactgtttgacatagtagcaattgttctttcttacatacaaatattacgtgttgtgtttcatctcccttctcgggaagcccggctcaagtccctcaacacttgtggttctcatgtctgtgtcatccttgccttctacacaccagccctcttttccttcatgacacatcgctttggtaggaatgtacctcgttatatacatatacttctggccaacctttatgttgtagtgccaccaatgctgaatcctgtcatatatggggtgagaaccaaacaaatctatgaccgtgtgaagaaaatattattgcaagtacgaggaaaggaaaaggaataa

SEQ ID NO: 77 - DNA, 954 bp, Mus musculus
  MOR158-1
atgagctgtgccccgaatgcttcacattctccaatcttcttgctccttgggttctcaagggctggtgtgccccacactttcctctttttattgttcctatttatttatctgaccaccatattggggaatgtgactttggtactgctcatctcttgggactccaggctccactcacctatgtattatctcttgcgtggcctctccatgatagacttgggactatccacagtcaccctgccacagctgttggttcatctgtcatctgattctccagccattcctgctgcccgctgtttgactcagttctttttcttttatgcatttggagtcacagatacacttgtcattgctgtcatggctctggatcgctatgtggccatctgtgaccctctgcactatgctttggtgatgaatcgacaaatttgtgcccggttactggccttgagctgggtggtatctatagtacacaccatgctgcatgtgggactcatcctgccactgtgttgggctggagatgctgggggcaatgttaaacttcctcacttcttttgtgatcaccgaccactcctgcgagcctcttgctctgacacacattccaatgagctggctatattcttggagggtggctttctaatgttgggaccttgttcccttattgtactttcctatgcccgaattgggatcaccatcttacgattgccttcagctgctggtcgccgcagagcagtctccacctgtggatcccacctcaccatggttggcttcctgtatggcacaatcatttgggtctatttccagcctccctcacagaactcccggaatcaagacatggtggcttcagtaatgtacactgctattaccccattggctaacccatttgtttatagtctccgtaataaggatgtgaaaggtgccctccacagactactgagacaggggagagtggactcctga

SEQ ID NO: 78 - DNA, 969 bp, Mus musculus
  MOR34-4
atgctcctgctgaatcaaacagaggtgaccccagtctcatttattctgaatggaatcccaggcctggaagaaatgcacatctggatttccttcccattctgttctatgtatgtaatagctgtggtaggcaattgtggactcctctacctcatcttctttgaagacagccttcacaggtcaatgtactacttcttggctatgctttcccttacagaccttgtcatgtgcagtgcttcaatacccaaaactctctgtatcttctggttctacattaaggaaattagctttactgattgtctggtccagatgttcttcatccatactttcacagcgatggagtctggggtgctcatgctcatggctctggaccgctatgtagcaatctgctaccctctgcactactccactatcctcaccaatcctgtcattgcaaaagctggccttgctacattcttgagagctgtggtgctcatcattcctttgattttcatcacaaagcatctgcccttctgcagaagcaatatattaatacaccatacctactgtgaccagttgtctgtagccaaggtctcctgtggaaatatcaaggtcaacattgtctatggtctgatgattgctctctttattgggggctttgatatcttgtgcatcacagtctcctacaccatgatcctgaaagcagtggtcagcttatcttcagcagatgctaggcagaaagctttcagcacctgcactgcccacatctgtgccattgttttctcctatagcccagccttcttttgtttcttttcccaccgctttggggggcacatcatccctccatcttgcctcatcattgtggctaacctttatctgcttttgcctcccactatgaaccctgtggtctatggagtgaaaaccaagcagatacgagactgtgtcataaggatcttttcaggttctaaggacatcaaatcccacagcatatga

SEQ ID NO: 79 - DNA, 972 bp, Mus musculus
  MOR34-5
atggtcatgtcagtgcagaatagcacagatctgaccccagcttcctttgttctgaatgggatcccaggcctggaagacatgcacatctggatctccttccctttctgttccatgtatgcagtggctatgatggggaactgtggactcctctatctcatcttctttgaggattccttacacagacccatgtactactttttagcaatgctttctctaacagaccttgtcatgtgctctagtacaatccccaaaaccctgtgcatcttctggtttcatctcaaagaaattggatttgatgactgtcttgtacagatgttcttcatccataccttcacggggatggagtctggagtgctcatgctcatggctctggaccgctatgtagccatctgctaccctctgcgttactccaccattctcaccaatcctatcattgccaagattgggttagccaccttcctgaggggcgttctgctaattattccattcacatttctcaccaagcgcctaccctactgtcgaggcaatataataaaccatacctactgtgaccacatgtctgtagccaagttgtcctgtggcaatgtcaaggtgaatgccatttatggtctgatggttgctctcttgattgggggctttgacatcctgtgcatcacaatctcctataccatgattctgagggcagtggtcagcttatcatcagcagatgctaggcagaaggccttcagcacctgcactgcccacatctgtgccattgttttctcctatagcccagccttcttttccttcttttcccaccgctttggggggcacacaatacctccatcttgccacatcattgtggctaatatttatctgcttttgcctcccactatgaaccctgttgtctatggagtgaaaaccaaacagatacgagactgtgtcataaggattctttcagggtctaaggattccaaagctcacggtatataa

SEQ ID NO: 80 - DNA, 957 bp, Mus musculus
  MOR31-8
atgcccataatggctacattcaacctcagcagcttcaatccaggatttttcatcctcctgggaatcccagggctggagcaattccacgtatggattgggatccccttctttattatctaccttgtggcatttgcaggcaacagcatcctactctacctcatttttatggagcgtagcctgcatgagcccatgttctttttcctctccttgctggatggtacagatctcatcctgtgtaatacttgtgttcccaaaaccttcagcattttctggctgggtcctcagcatatcacatttcctggatgtcttactcagatgtttttcctccacttcagctttgctatggattctgctatcctgctgtctatggcatttgatcgctatgttgctatctgcttccccttaagatataccaccatcctcacccatcagattgttattaagattgtggtggcaattatcagcaggagcttttgtatcatcttcccatgtgtgttcttgctaaaacgactgcctttctgccgagagctcgtcattcctcacacatactgtgagcacataggcattgctcgtctggcttgtgctgacatctccatcaatatctggtatggctttgcagtaccaataatgactgtcatgtcagatctgatcttgattggcatctcctacactgttattcttcgtgctgtctttaaccttccctcccaggatgcccgcaagaaagcccttagcacatgtggttcccatgtctgtgtcattcttatattctacacaccagccatattttctgtccttgtccatcgttttggtcacaatatcccccactccttccatatactgtttgcaaatctctatgtatccatccctcctgccatcaacccagtcatctatggggtaaagaccaagcagattcgggacaaaatcaacctcctattcttccccaaagacaaccattga

SEQ ID NO: 81 - DNA, 957 bp, Mus musculus
  MOR31-9
atgacaatgtcttcaaatcacaccaaccttagagacatttggtacaccatgattgggatcccaggattagaagatgcacacgtttggctctccatccccatctgttcaatgtacatagtggccctaataggcaataccctattaatattcctgatcttcacagaacacagtcttcatgaaccaatgtaccttttcctctccatgttggcccttgctgatatcattctatctacagtgaccacgccaaaagttcttgccatcttttggtttcaagctggaggcatttctttcactagctgtgtgtctcagatgttttttctgcacttcatgtttgtaaccgagtctgccatactgctggctatggcaattgaccgttatatagccatctgctttccactaagatatactaccattttaaccccttcagtaatctgcagaatgggcattgcatctgtgactagaagcttcttaatcattttccccttggtctttctagtttatcgactcaattattgtgggaggaacatcattcgtcactcatactgtgaacacatgggcattgctaggttagcctgtgacagcatcaaagtcaatatttactatggaatgactgtgcctttattttccataggcctagacattatgcttatcatcatctcctacacccttatacttcatacagtatttagaatcccatctcaaaatgctcgacgcaaggctctgggtacatgtggctcccatgtctgtgtcatccttctgttctatacaccttctctctttaccttttttgctcaccgttttgggggccacaccataccacgtcacatgcacattctttttgctaacctctatgtggtggtacctcctgcactcaaccctatcatatatggagtgaagacaaagcaaattcaagacaggtttttccagctgttttctttcactaaggcgtgtttttga

SEQ ID NO: 82 - DNA, 945 bp, Mus musculus
  MOR39-1
atgccttcatgtaataattccattcctcagcccttgatattcatcctggctggaatcccaggcctcgaatcctcccatggatggttctctatatcctttttcttgatatttgtagtaaccatcataggaaatgtcaccattttacatatcatttggatagagaagactctccatgagccgatgtttctcctcttggctacactatcagtcgtggacttgtgcctggtaacagtcactgtaccccgaatgctaggaatcttttggctgaatgccaaagaaatcagccttgaagcctgcctcacacagatgtttttcatcccttccttttatgtcatggaatcagggatcctcttggccatggcttttgatagatttgcagctatttggtaccctttgaggtacacaaccatccttgacagcaacatgcttgtgaagatggcactggctatactggcaagggcagtagcagtggtcacccctgcaccaatcctaactaaaagattggaaagattccaaacccaggtcattagttattcctactgtgcgtacatggctgtagtgatgattgcttgtggggatatctccaaccacattgtctatggcctcatggttattgtagcatctgtggggattgatctatttttggtcatcctgtcgtatacactgattcttcgtgctgtctttcatattccatcttggcaagccaggagcaaagctctcagcacatgtggttctcatctttgtgtcattggtctgttttattctccagttgtcttttctgtcttatcccagattttagggtaccatatggctccctacttacagattataattgacaatttatatttcctggtgcctcctatggtcaaccccttaatatatgcagtccgaaccaaacagataagggagcgggtattgcggatattgaactgtgagaggaaataa

SEQ ID NO: 83 - DNA, 960 bp, Mus musculus
  MOR40-1
atgatcagaaggcaacacatggaagcacaaagcaacacttcctctatcctggcccctgacttcctcctcatctgcttccccaactaccagacctggcagcattggctgtccctgcccctcagcctcctcttcctcctggccatgggagccaatgccacccttctcatcaccatcaggatggaggcctctctgcatgagcccatgtactacctgctcagccttctgtccctgctggacattgtgctctgcctcactgtcatacctaaggtcctggccatcttctggtttgacaataaatctattggcttctcttcctgcttcctccagatgtttgtcatgaacagtttcctgacgatggagtcctgcaccttcatggtcatggcttatgaccgctatgtggccatctgtaagcctctacagtacccatccatcatcactgatcagtttgtggttagggctgccatctttgtagcagccagaaatgggattcttactatgcccatccccatactttcttcccaactgagatattgtgcaagaattatcaggaactgcatctgcactaacatgtctgtttccaaactctcctgtgatgacatcacttttaataaactctaccagtttgttataggttggaccctgctgggttctgacctcatcctcattgttctatcttattcattcattctgaaggctgtgctcaggatcaaagcagagggagctgtggccaaagccctgagcacatgtggttcccacttcatcctcatcctcttcttcagcacagtcttgctggtgctagtcatcactaacctggccagggagaggattcctccggacgtccccatcctgctcaatatcctgcatcacctcatccccccagctctgaatcccattgtttatggggtaagaaccagggagatcaagcagggaatacggaaccttcttaggaggaggttgtaa

SEQ ID NO: 84 - DNA, 948 bp, Mus musculus
  MOR40-2
atgacagcacacaagaacgacaccaaccctactggagtttcagacttcctcctaaattgttttgtcaggtctcccagctggcagctctggctctccctgccactcagccttctcttcctcctagccatgggggctaatgctattcttctgatcaccatccggatggaggcctctctgcatgaacccatgtactacctgctcagcctcctctccatgctggacatcatactctgcctcactgtcatccccaaggtactagccatcttctggtttgacctcagagccattggctttcctgcctgtttcctccaaatgtatatcatgaacagctttcttgctatggaatcttgcacatttatgatcatggccttcgatcgctatatagccatctgtcacccactgagatatccatccatcatcactgaccaatttgtagtcaaggcggccacattcattctggtcaggaatgtccttattactttgcccatccccattctttcagcacgactccattactgtgggagaaatgttattgagaactgcatctgtgccaacatgtccgtctctagactctcttgtaatgatgtcaatgtcaaccgtctttatcagtttgctataggctggactttgctgggatcagacctattcctcatcttcctctcttatacccttatactaagagctgtgctgagactcaaggcagagggtgctgtagccaaagctctgagcacatgtggctctcacttcatccttattctgttttttagcaccatccttttggtttttatcctcacacatgtagctaagaggaaggtctcttctgatgtgccaatcttgctcaatgtcctccaccatgtcatccctgctgcccttaatcccattgtttatggggtaagaactcaggagattaagcaaggaatcaagaaattgttgaaaaaggggtggtaa

SEQ ID NO: 85 - DNA, 954 bp, Mus musculus
  MOR34-6
atgctgatttccaacaactcatatgaagccccgcagtctttcattcttaatggaattcctggtctcgaagcagtgcatatatggatctctcttccactctgtacaatgtacatcatctccctagtaggcaaccttggccttgtatatctcatttactatgaggaatccttacatcgcccaatgtatttctttctggccatgctttctctcatagacctgtttacttgcacaaccactgtccccaatgccctcttcattttctggttcaaactcaaggaaattaacttcactgcttgcctagttcagatgttctttgtgcacggattcacaggtgtggagtctggggtactcatgctcatggccttggaccgctatgtggccatttgctacccactacgctatgcaaccatacttaccaaccctgtcattgccaaagctgggcttgccaccttcttgagaggtgtgttactgatgattccttttccattcttggttaaacgtttgcccttctgccgaagcaatgtcatctcccatacatattgtgaccacatgtctgtggtaaagttatcctgtgccagcatcaaaatcaatgtcatctatggtctcatggttgcacttctgattggagtgtttgacatatgttgtatatctgtgtcctacactatgatcctccgggcagtggtcagcctgtcctctgcagatgctcggcagaaggccttcagcacctgcacagcccacatatctgccatcatcattacttatgttccagccttcttcaccttctttactcatcgttttggaggtcacaccatccctccttctcttcatatcattgtggctaatctttatcttcttctccctccaactctaaatcccattgtttatgggatgaagaccaaacagatcagagatagtatcattaaattctttcacggtgaaaaaggttcaaggtga

SEQ ID NO: 86 - DNA, 930 bp, Mus musculus
  MOR139-2
atggactcaagtaacaggacaagagttgcagaatttcttcttcttggatttttagaaaacaaagacctgcaacccattatttatggtcttttcctctctatgtacctggttactgttgttgggaacatgttaattattgtggctattatttcaggcccccgactgcatacccccatgtatttcttcctgtctaatctgtcctttgtggacatctgtttcatttcaactactattccaaagatgttagtaaacatacagacccaaaacaaggtcatcacctatgcagggtgcattacccagatatactttttcttgctttttgtggaattggacaacttcttgctcactatcatggcctatgaccgttatgtggccatctgtcaccctatgcgctacacagttatcatgaactaccagctctgtggatttctggttctggtgtcttggattgtaagtgttctgcatgccttatttcaaagcttaatgatgttggagctgcccttctgcacacagccagaaatcccacacttcttctgtgaacctaatcaggtgattcaactcacttgttctgatgcatttcttaatgatatggtgatatattttacacttgtgctgctagctattgttcctcttgctggtgtcttctattcttacttcaagatagtgtcctccatacgtgcaatgtcctcagttcatgggaagtacaaagcattctccacctgtgcatctcatctattagttgtatcattattttactgtacaggcctaggagtgtacctcagttctgctgcaaaccatgggtcacaaacaagtgcaacagcctcagtcacgtacactgtagttacccctatgatgaaccctttcatctatagtcttaggaataaagatgttaagagtgccctaaaaagactcttcgtgaggaaattataa

SEQ ID NO: 87 - DNA, 960 bp, Mus musculus
  MOR139-3
atggaaacaggaaatgacactcagctttcagaattctttcttctgggattttcagagaatcaacctcaaattcagcctgtcatatttggactgttcctcttcatgtatatattgactttcactggaaacctactcatcatcatggccatcattgttgactcccacctgcacacacccatgtacctcttcctctctaatctgtcctttgtggacatctgcttcacttccaccactgttccacagatgctggtaaacattcacacacaaagcaaggccatcacctatgcaggctgcatcatccagatgtacttcttactgcttttttcagggttagacatctttctgctgactgtgatggcctatgaccgctatgtggccatctgtcaccccctgcattacatgatcatcatgagcacaagacgctgtggattgatgattctggcatgctggattataggtgttataaattccctgttacacacctttttggtgttacggctgtcattctgcacaaacttggaaatcccccattttttctgtgaacttaatcaagttgtacaccaggcctgttctgacacctttcttaatgatatggtaatttacattacagctatgctactggctgttggccccttctctggtatcctttactcttactctaggatagtatcctccatttgtgcaatctcctcagtgcaggggaagtacaaagcattttccacctgtgcatctcacctctcagttgtctccttattttattgcaccctcctgggagtgtacctcagctctgctgtgacccaaaactcacatgctactgcaacagcttcattgatgtacactgtggtcacccccatgctgaatcccttcatctacagtctgaggaacaaagacataaagacagctctgaaaatcctgttagggagtgtaactagaagcagatcaatggattcaccttcataa

SEQ ID NO: 88 - DNA, 960 bp, Mus musculus
  MOR139-4
atggaaccaggaaatgacactcagctttcagaattctttcttctggaattatcagagaatcaacctcaaattcagcctctcatatttggactgttcctttccatgtacctagtgactgtcactggaaacctactcatcatcatggccatcactgccgactcccacctgcacacacccatgtacatcttcctctctaatctgtcctttgtggacatctgctttacttccaccactgttccacagatgctggtgaccattcacacacagagcaaggccatcacctatgcaaactgcatcacccaggtatactttttactacttttttcggtactggacatctttctgctgactgtgatggcctatgaccactatgtggccatctgtcaccccctgcattacatgatcatcatgaacacaagacgctgtggattgatgattctggcatgctggattataggtgttataaattccctgttacacacctttttggcattacggctgtcattctgcacagacctggagatccctcacttttactgtgaacttaatcaagttgtacaccatgcctgttctgacatctctcttaatgacatggtgatttacattgcagctatgctactggttgtgggacccctctctggtatcctttactcttactctaagatagtgtcctccatttgtgcaatctcctcagtgcaggggaagtacaaagcattttccacctgtgcatctcacctctcagttgtctccttattttattgtaccctcctgggagtgtacctcagttctgctgtgactcaaaatgcacaggccactgcattggcttcactgatgtacactgtggtcacccccatgctgaacccattcatctatagtttaaggaataatgacatgaaaaaggctctgaaaatagttttagggagggtaactagaaacagactaacggacttaccttcttag

SEQ ID NO: 89 - DNA, 939 bp, Mus musculus
  MOR103-2
atgaggggggagaacatcaccaaggtcagcaccttcatcctgctgggcttccccacagcccctgagctgcaatacctgctcttcctcctcttcctgctcgcctacctctttgtgctggtggagaacctggccatcatcctcactgtctggagcagcgcctccctccacagacccatgtactacttcctgggcatcatgtccaccttggagatctggtatgtttgtgacatcatccctaagatgctggacggcttcctcctgcagaggaaacgcatctctttcattggatgcatgactcagctctacttcttcagctccctggtgtgtacagaatgtgtactcttggcttccatggcctatgaccgctatgtggccatctgccaccccctgcgctaccaagtcatcatgaccacagggctgtgtgtccagcttgtggccttctcttttgctagtggcttcagcatctctgtgattaaggtctactttatctccagtgccaccttctgtggctccaatgtcttgaaccacttcttctgtgacatctcccccatcctcaagctggcctgcactgacttctctactgcagagctggtggacttcatcctggccttcatcattctggtgttcccacttctggccaccgttctctcctatggccacatcaccctggctgtgctgcgcatcccttcagccacaggccggtggagagccttctccacctgtgcctcccacctcactgtggttaccattttctacacagctttgctcttcatgtatgtgaggccccaggccatcgatacccggagctccaacaaactcatctctgttctgtatacagttcttacacccatcttgaaccccttgatctactgcctgaggaacaaagaatttaaagatgccttaagaaaggccttgggcttgggtcaagctcccttgtag

SEQ ID NO: 90 - DNA, 939 bp, Mus musculus
  MOR103-3
atgaggggggagaacatcaccaaggtcagcaccttcatcctgctgggcttccccacagcccctgagctgcaatacctgctcttcctcctcttcctgctcgcctacctctttgtgctggtggagaacctgaccatcatcctcactgtctggagcagcgcctccctccacagacccatgtactacttcctgggatccttgtctttcctagagatctggtatgtgtcagacatcatccccaaaatgctggatggcttcctcttgcagaggaaacgcatctctttcattggatgcatgactcagctctacttcttcagctccctggtatgtacagagtgtgtactcctggcttccatggcctatgaccgctatgtggccatctgccaccccctgcgctaccaagtcatcatgaccacagggctgtgtgtccagcttgtggccttctcttttgctagtggcttcaccatctctgtgattaaggtctactttatctccagcgccaccttctgtggctccaatgtcttgaaccacttcttctgtgacatctcccccatcctcaagctggcctgcactgacttctctactgcagagctggtggacttcatcctggccttcatcattctggtgttcccactcttggccaccattctctcctatggccacatcaccctggctgtgctgcgcatcccttcagccacaggccggtggagagccttctccacctgtgcttcccacctcactgtggtcaccttcttctacatggccatgatcttcatgtatgtgcgaccccaggccattgatacccggagctccaacaagctcatctctgctgtgtacaccgtcctcacgcccatgatgaatcctttgatctactgtctgaggaatactgaatttaaggatgctgtgagaagaactttgggattgggaaatactccccagtag

SEQ ID NO: 91 - DNA, 972 bp, Mus musculus
  MOR208-1
atggccacacaagtgcacagaaatggaagcctctcagcagtgtccttgcaggggtttgtgttggtgggatttgggggaggtgcaaagacccaggctctgctctttgccgtgttcctgaccctgtatgtagtgaccgtcctgggcaacctcaccatgatcgtggtcatcaccctggatgcccgcctgcactcccccatgtacttcttcctcaagaacctgtcctttgttgacttctgctactcctctgtcattgctcccaaagccatgaccatctttctctcttcttctaaggtcatcagctttgcaggatgtgccactcagttcttctttttctcccttctggttacaactgaaggcttcctgttggcagtcatggcctatgaccgtttcatggccatctgcagtcccctgaggtaccctgtgaccatgtgtcccatggcatgtgcccgactagtcctgggcacatactgtggtggctgcctgaactccattgtgcagaccagcctcacgttccagctgcccttctgcagctccaaccgtattgaccacttctactgtgatgtgcccccattgctccagctggcctgtgctgacacaactctcaatgagtttgtcatgtttggcatctgtgggctcatcatcgtgtctaccactcttgtggtcctgatctcctatggctacatcacaatgaccattctcaggatgcgctcagggtcagggcggcacaaggtcttctccacctgtggttcacacatgacagctgtgtccttgttttatggaactgtgtttgtcatgtatgctcagccaggtgctctgacatccatggagcaggggaaagtggtctctgtcttctacaccctggttattcccatgctgaaccccctcatctacagtctgcgcaacaaggatgtgaaggacgccccgaggaggctgggacagagacatagccttgtgaaggaggatgtgcaatga

SEQ ID NO: 92 - DNA, 930 bp, Mus musculus
  MOR160-1
atgaggaaccacagcacggtccccgagtttatcctgcttgggctgtctgctgatgcccaggtccaggctctactctttgtgcttttcctggtgatttacctcctgaccctcatggggaacctgatgctgctgctggtggttaaggtcgatcgccacctccacacacccatgtacttcttcctgggacaactgtccttcctagacctctgccactcctccgtctcagtgcccaagctgttggagaacctcctgtctgtgaagaagaccatctcagtggagggctgcctggctcaggtcttctttgtgttcgctactggaggcacggagtcctgcctgcttgccgtgatggcctatgaccgctatgtggccatcagctctcctctgctctacggtcaagtgatgagcaggcagctgtgtgcagggctggtgtggggctcgtggagcctggcttttctggatgccttcatcaatatccttgtcgctttgaatttagatttctgtgaggcacagaatatccaccacttcatctgtgagctgccctccctctatcctttgtcttgctctgatgtgtctgcgagctttaccaccctcctctgctccagcttcatccacttcttcggaaacttcctcttgatactcttgtcgtacattcgcatcctgctcaccatcctggggataagctcagcctctgggagaagcaaggccttttctacctgttcctcccacctcacggccgtcagcttcttttacggctcagggttactccgctacctcatgccaaattccggatcgactcaagagctgatcttctctctacagtacagcgtcatcacgcccatgctgaaccccctcatctacagcctgaagaacaaggaggtgaaggccgctgtgagaagaacggtcacgaaatatttgcagtgtttcaaatag

SEQ ID NO: 93 - DNA, 945 bp, Mus musculus
  MOR103-4
atgctggatatgaacattactctggtcagtgagtttatcctggtgggcttccctacagccccttggctacagatcctcctattcttcatttttcttgtagtctatatgttgattatagcagaaaatcttgtaattatattcactgtctggtccactggctccctccataagcccatgtactatttcttaagtagtatgtcctttttagagatctggtatgtctctgtcacagtccccaagatgctagatggattcctcctgcagagacggcacatctccttcacaggctgtatgactcagctctacttctttatctcacttgcctgcacagagtgtgtgctcctggcagctatggcctatgaccgctatgtggccatctgccaccctcttcgatatccagtcatcatgaccacagtttactgcatgcagctaatggccctttcctattttagtggtttcatggtctctgtcgtcaaagtctatttcatttcacatgttgctttctgtggctccaatgtcatgaaccacttcttctgtgatatctcaccaatcctcaaattggcatgcaaagatatgtccacagctgagctagtagactttgctttggctattgttattcttgtcttccctcttatcaccactgtcctctcctatgtctacatagtgtctaccattctgcatataccctccacccagggaagaaagaaggccttctctacctgtgcctcccatctcactgtggtcataatttattacacagccatgattttcatgtacgtccgacccagggctattgcatcttttaattccaataaactcatttcagctgtatatgctgtcctcacacccatgcttaatcccttcatctactgcctaaggaaccgggaagtcaaggatgcaatcaagaagactctgggaggtggccagtgcttcctgctttgttga

SEQ ID NO: 94 - DNA, 975 bp, Mus musculus
  MOR263-1
atgttatttatgctcattcccatggctacaggaaaccagacaagaataactgaatttatcctcatgagcttctcttccctacctactgaaatacagaccttactcttcctggcatttctcaccatctacctggttactctgctgggaaacagcctcatcattctggtgaccttggctgaccccatgctgcaaagccccatgtatttctttctcaggaacttatccttcttagagattggcttcaatctagtcattgtgcccaaaatgttggggactctgattgcgcaggacacaagcatctccttcctgggctgtgccactcagatgtatttcttcttcttctttggagtggctgagtgcttcctccttgccaccatggcatatgaccgctatgtggccatctgcagtcccttgcattacccagtcatcatgaaccaagagacacgtgtcaaactggctgctgcctcctggtttccaggattccctgtagccaccgtgcagaccacatggctcttcagttttccattctgtgccaccaacaaagtgaatcacttcttctgtgacagcccacctgtgctgaggctggtctgtgcagacacagcacagtttgaagtctatgccattgttgggactattctggttgtcatgataccctgcctgctgatcctatgttcatacactctcattgcagcttccatcctcaagattccatcagctaaagggaagcacaaagccttctccacctgttcctcacatctcctcgttgtctctcttttctatgtgtcttcaagcctcacttactttaggcctaaatcaaataattctcctgaaagcaagaaattgttatcgttgtcctacactgttgtgactcccatgttgaaccccatcatctatagcctgagaaataatgaggtgaagagtgccctcagcaggaccttccacaaggccctggccctcagaaaccatatcacataa

SEQ ID NO: 95 - DNA, 954 bp, Mus musculus
  MOR263-2
atggctgcaggaaaccagacaagaatagctgaatttatcctcatgggcttctcttccctacctactgagatacagaccttgctcttcctggcatttctcaccatctacctggttactctgctgggaaacagcctcatcattctggtgaccttggctgaccccatgctgcaaagccccatgtatttctttctcaggaacttatccttcatggagatcggcttcaacctagtcattctgcccaaaatgttgaggactctgattgcccaggacacaagcatctccttcctgggctgtgccactcagatgtatttcttcttcttctttggagtggccgagtgcttcctcctcgccaccatggcatatgaccgctatgtggccatctgcagtcccttgcattacccaatcatcatgaaccaagggacacatgccagactggctgctgcctcctggtttccagggtttcctgtagccactgtgcagaccacatggctcttcagttttccattctgtgccaacaacaaggtgaatcacttcttctgtgacagcccacctgtgctgaggctggtctgtgcagacacagcccggtttgaggtctatgccattgtcgggactattctggttgtcatgataccctgcctgctgatcctatgttcatacactctcattgcagcttccatcctcaagattccatcagctaaagggaaacacaaagccttctccacctgttcctcacatctcgtcgttgtctctcttttctatgtgtcgttaagcctcacttactttagacctaaatcaaagaattctcctgaaagcaagaaattgttatcactgtcctacactgttgtgactcctctgttgaaccccattatctatagtctgagaaataatgaagtgaaaaatgcactcagcagaactttccacaaggccctggccctcagaaaatttatcctgtag

SEQ ID NO: 96 - DNA, 951 bp, Mus musculus
  MOR283-2
atggagccttggaactccaccttgggaactgatttcaacttagtggggattctggatgacagtggctctcctgaactgctttgtgccacattcacagctctgtacatgttggctctgataagcaatggactgctgatcctggtcatcaccatggatgcccgtcttcatgtacccatgtacttcctgcttgggcagctgtctctcatggatctcctcttcacttcagttgtcactcccaaggctgtcatagactttctgctcagagacaataccatctcatttgagggctgttccctccagatgttcctggcactgacactgggtggtgcagaagacctccttctggccttcatggcctatgacaggtatgtggccatttgtcacccgctgaactacatgatcttcatgagaccaagcatctgctggcttatggtggccacatcatggatcctagcatctctgatggccctaggatataccacctataccatgcagtattcctattgcaaatcccggaagatcagacacttgctttgtgagatccctccattgctgaagctggcctgtgcagacacctccaagtatgaactcatggtttatgtgatgggtgtgactttcctcattcctcctcttgctgccatcctggcctcctactcactaattttgttcactgtgctccatatgccctcaaatgagggcaggaagaaagcccttgtcacatgttcttcacatctgactgtagttggaatgttctatggggctgccacattcatgtatgtattgcccagttcctttcacagccctagacaagacaatatcatttctgtgttttacacaatagttaccccagccctgaacccactcatctacagcctgaggaataaagaggtcactggagctttaataagggttctgggaaggtatattgtgccagcacaccctactctctag

SEQ ID NO: 97 - DNA, 981 bp, Mus musculus
  MOR264-1
atggaatttgttttatctgcagataaaaaagaaattaaatcaaaaaatttaaacatttcaattacagaatttgttctcttagggttttctgatgtccctcaactccagtggatgctttttgggatatttttgttcatgtatttgtctattctgatcagcaacagcattataatgttaataacaagaactgactctgctctgcagacccctatgtactttttccttagcaacttttcttttgtggaaatctgctatgtaacagtcacaatcccaaggatgctcatggacctttgtacccaaaagggaactatttccttgttgtcctgtgctgtacagctctgttttgtcatcatgcttggaggcatggagttcctcctcctgacagtcatggcctatgaccgttatgtggccatctgcaatcctttgcattatcccttggtcatgaacaataaggtctgtgtgcagcttgtggctgcttgctggatctgcattattccagttgtgactggacaaacttaccagattttctctttgccttattgtggctctaacaaaattcatcactttttctgtgacattcccccactactcaagcttgcttgtggtgacacatttgtgaataatttagccatctatattgcttcagtagtgtttatcatggtcccatttctgttaatccttgtctcctatggcaagattatctgcaacgttctaaaactggcaacatctggagggaggtctaaagccttttccacatgctcatctcatctaatagttgtggtgttgttttatggaacagctactatcacatatgcacaaccaaaagcatatcagtcggaaaccttgggaaagctgctatctcttttctacaccattttgattccactgttgaatcccattatatatacactgaggaataaggatatcatggtagcattgagaaaattacaaactaagttatcaacatatgggaacacttag

SEQ ID NO: 98 - DNA, 939 bp, Mus musculus
  MOR176-1
atgacttttgagaatttcaccatgttgacagaatttgtcttcttagggctttctggcaggcaggatgtgcaacagggcctctttgcattgttcttccttgtttatggcataactgtaattgctaatctaggaatggtcatattgattaaactggacagcaggcttcacacacctatgtactatttcctgagcaacctgtcattttgtgacatctgctactcctccaccgtctctcccaagatgctggctgatttcttgtctaaagagaagaggattccttataatttatgtgctgttcaaatgtattttttcggggcctttgcagatgtagaatgtctcatgctagctgtcatggcctatgatcgttatgttgccatctgcaatcccctgctctatacaattgtgatgtccaagaagctctgcatccaacttgtggctgttgcctatgcaataggcttggtagattcagcaatccatacaagctgtacattccgattatccttctgcaattcaaatgtcatcaaccactttttctgtgacatcccacccttactggccctctcctgctcagatacatccatcaatgaaatagtgatgttcacattcattggctgtgttgtagggattagcattgtcacagtccttctatcctactgctacatcattgctaccatctgcaggatgaactctgctgagggcaggcacaaagcattttccacatgtgcctcccatcttatggctgtggctatttttcatggaactctgcttttcatgtatttccgacccagctcaagttactccatggacacagacaaaatggcctctgttttctacacagttgtgattcctatgttaaacccacttatctacagtttgagaaataaggatgtgaagggggctctgaagaaggcaatcaatattaacttgtggcctgggtga

SEQ ID NO: 99 - DNA, 945 bp, Mus musculus
  MOR264-2
atggaacactcagagaacagtgccatggataatgcaacctcagtgacacagtttctcttactggggttctctggcgtacctaacctgcaaacatttctgtttgggatgttttccataatgtatgtggttatcttaataggaaacacctctatacttgttatagcaagaattgatcctgcactacaaaaacccatgtattatttcctggccaatttttcatttctggaaatttgttatgtatcagtcacccttccccgcattctctacaatctttggacacaagacagaggaatttgtctcctggcctgtgctattcaaatgtttttcttcctaattctggcagccactgagtgttttcttctggctgtgatgtcctatgaccgctatgtggccatctgcaaccctctgcactatcctctggtcatgaatccaacaaagtgcactcagctggctgtgggctcttggctcggtggtatcccagtccagataggacaaacttgtcgaatattctctctacatttctgcaattctaatataatagagcacttcttctgtgatgttcccccaattctcaagctggcctgtggggacacttcaatgcatgagttgtctgtatacttagtggctatgttttttgttgcctctccttttatgttaatacttgcttcctacagcaaaatcattgctaccattctaaagttgccaacagccacaggacgggcaaaagctttctccacttgttcttcacatctggtggtagtgcttttattttttggatcagctaccattaactacttgaggccaaagtccattcattctgtaggaactgatgaactactctctctgttttacacaattgtgacccccatgttcaatcccctaatatacagcctcagaaacaaggatgtgattgcagcattaagaaggcttttacttaaaatttag

SEQ ID NO: 100 - DNA, 957 bp, Mus musculus
  MOR264-3
atgaaccatcagcaaaaaccacaagaaggaaatctaaccaatctgaaggaatttgttcttcttggattttcagatgttcctgatctccagtgggttctatttggactattgattgctatgtattgtttcatcctattaggcaatggcaccattgtactaatcacaaacgtagactctgctcttcagacacctatgtacttttttcttggtaacttttcctttttagagatatgttatgtatcaattactcttccaagaatggtcttcaaccttggaacacaaagaaggaccatctctttcattgcctgtgctacacaaatgtgcttcactcttatcctgggagccacagagtgcttcttgctggctgtgatggcctatgaccgttatgttgctatctgtaatcccctgcattatcctctagttatgaaccaaaaggtgtgttcccaactggtgattggctcctggataagtggaatcccaattcagatagggcagacatcacatatcttttctctgtcattttgtggttccaaccagatcaaccacttcttctgtgatattcccccaatacttcacctggcctgtggggacatctttatcaatgagatgatggttttcctaggtgcttttttatttgtcttgtttccattcatgttaatagtattttcctatagtaaaatcatctctacagtcttgaagctatcatcaaccaaaagtcgagccaaagccttctctacttgttcttctcatcttgcagttgtgatattattttttggatcagctatgattacatattttagatccaatgctagtcattcaggtgagacagataaagttctttctcttttctataccgttgtgactcctatgtttaatcccatggtatacagtctaagaaacaaggatgtcacaatagcactgagaaaattcttatgcaaacaatttgtgaaaatataa

SEQ ID NO: 101 - DNA, 954 bp, Mus musculus
  MOR274-1
atggaaggggacaacacatcatccacggacttcactttcatggggctgttcaacacagaggaaacctcaggtcttgtatttgccacaatctccgtcatcttcctcactgcactggtggccaatggaattatgatctttctgatccacacagacgctcacctccacacccctatgtactttctcctcagtcacttgtccttcattgacatgatgtacatctcaaccattgtgcccaagatgctagttgattatcttctagggcaaaggactatttcctttgtgggatgcacagctcaacactttctatacctcaccctggtgggagccgagttctttcttctgggcctcatggcttatgatcgttatgtggccatctgcaacccactgaggtaccctgtcctcatgagccgccggatctgttggattatcatagcaggctcctggtttgggggatctttggatggcttcctcctcactccaatcaccatgagttttcctttctgtagatcacgagagattaatcacttcttctgtgaggcacctgctgtgctgaagttggcatgtgcagacacagccctctatgagacagtgatgtatgtgtgctgcgttctgatgctgttgattcctttctctgtggttatctcatcctatgcgcggattctggccactgtctaccatatgagctctgtggaaggaaggaagaaagcgtttgctacctgctcgtctcacatgactgtggtaaccttgttttatggggctgccatatacacctatatggtaccacactcttaccattccccatcccaagacaaaattttttctgtgttctataccattctcacacccatgctgaaccccctcatttacagcatgaggaacaaagatgtgtctggaggtctgaggagggcactggggaagatcaggagttctcagcgagtgtccaaagactattga

SEQ ID NO: 102 - DNA, 930 bp, Mus musculus
  MOR251-1
atggcaataaacaattccacaactgtggtggagtttgtcctgcagggactctctgaggaccctgggctccaggctctcttcttggcctttttcttgctcctttacatcctggctcttgcaggaaacaccctcatcatcatagccatcagcctcaacccaaggcttcacacacccatgtatttcttccttgcaaacctggccctgttggacatcatctgtacctccactgttgttcccaagctgctggagggtttggtgggtaagagcagccacatttcttataagggatgcatgacccaagtcttcttcctcatctgggttctaggggctgagctgctgctgctcactgccatggcctatgaccgctatgtggccatctgccgcccactgcactacaacacactgatgagctggcccatctgtgtcctgcttgcaggttttgtgtgggtgattggcatagccaacacatctgtgcatattggcctgctggtgcgactcaatttctgtggctccaaccaaattcgtcacttcttatgtgaagtcccaacactgctgcttctgtcttgcagcccaaccaccctcaacaacattatgcttgtcatcgcagatgtttattttggtgtgctcaactttctgttgactatgatatcctacagcttcatcatttccagcatcctgcgcattcgctcagccgagggcaagaagcgtgcattctctacctgctctgcccacctggtagtagtcaccctgtactactccaccatcatctacacctatctacagcctggctctggatcctccttccagaatagcaaggttgttaccttactgtacacagcagtcagccctaccttgaatcccatcatttattctctaaggaacaaggatgtgaaggtagccctcaaaaggttatttccctgttttcattga

SEQ ID NO: 103 - DNA, 936 bp, Mus musculus
  MOR135-1
atgataaagaacaaccaaactctcttcaaccagttcctcctcctgggcctgccgatccctgcagagcaccagcaactgttctttgccctgttcctgtccatgtacctcaccaccatcctggggaacctcatcatcatcatcctcattcgactggactcccatctccacacacccatgtacttgtttctcagcaacttgtccttctctgatctctgcttttcctctgtcacaatgcccaagttgctgcagaacatgcagagccaggacacatccatcacctatgcaggctgcctgacacaaatgtacttttttgttctttttggaggcctggaaatcttcctccttgtggtcatggcctatgaccgctatgtggccatctgccttccccttcactacaccagcatcatgagtctcaagctctgtgtgtgtctggtgctgctgtcctgggtgattagtatactgaattccatgttacacactctactcttggctaggttgtcattctgtgaggacaacatgatccgccactttttctgtgacatgtctgccctgctcaagttggcctgctctgatatttatataaatgaacttatgatatttatcttgggaggaccccttatggtcattccattcttactcattgttatgtcctatgtacaaattatcttctctattctaaaggcttcatctactcgggccatctacaaggtcttctctacctgtggctcccacctgactgtggtgtcactattctatgggacaattattggtctctacttatgtccatcagctaataactttacagcaaaggaggcttctattgccataatgtacacagtggtgactcccatgctaaaccctttcatctatagcctgaggaacagagatataaaggaggcccttataaacgttcttatcaagaaaatacctttataa

SEQ ID NO: 104 - DNA, 945 bp, Mus musculus
  MOR135-2
atgactagaagaaaccaaactgtcatctcccagttccttctcctgggtctgcctattcccccagagcaccagcaactgtactatgccctgctcctgtccatgtatctcaccactgtcctggggaacctcatcatcatcatcctcattcttctggactcccatctccacacacccatgtacttgtttctcagtaatttatcctttgctgacctctgcttttcctctgtcacaatgcccaagttgttgcagaacatgcaaagcaaagttccatctattccttatgcaggttgcctggcacaaatatacttctttctgtattttggagaccttggaaacttcctccttgttgccatggcctatgaccgctatgtggccatctgcttcccccttcattacatgagcatcatgagccccaggctctgtgtgagtctggtgctgctgtcctgggtgctgaccaccttccatgccatgctgcacaccttgctcatggccagattgtcattctgtgaagacaatgtgatcccccactacttttgtgatatgtctactctgcttaaagtggcttgttctgacacccatgataatgaattagcaatatttattttagggggtcctatagttgtactccctttccttctcatcattgtatcttatgcaagaattgtttcctccatcttcaagttcccttcttttcaaggcatccgtaaagccttttctacctgtgggtctcacctgtctgtggtgtcactgttctatgggacagtcattggtctctacttatgtccttcagctaataacacttatgtgaaggagaccatcatgtctttaatgtacacgatggtgactcccatgctgaaccccttcatctacagcctgagtaatagagacataaaagatgcactagaaaagataatgtgcaaaagacaaattcccttcttcctatga

SEQ ID NO: 105 - DNA, 939 bp, Mus musculus
  MOR135-3
atgataaagaacaaccaaactgtcatctcccagtttcttctcctgggcctgcccatccccccagagcaccagcacctgttctatgccctgttcctggccatgtacctcaccaccgtcctggggaacctcatcatcatcatcctcataatactggacttccatctccacacacccatatacttgtttctcagcaacttgtcattctctgatctctgtttttcctctgtcacaatgcccaagttgctgcagaacatgcaaagccaggacacaaccatctcctatgtaggttgtctgacacaaatgtactttccaaatgtttttgcaaacctagagaactttcttcttatgttcatggcctatgaccgctatgtggccatatgttaccctcttcgttataccagcatcatgagtcccattctctgtgtttgtatggtgtttatgtcctggttacttaccatgctgaattccacattgcacactgtacttattgttaaattatcattctgtgaggacaatgtgatcccccactttttctgtgacatatctgccgttctcaagttggcctgctctgacatttatattaatgagctaacgatatttatcacgggagcattcattattgtcatcccattcttactcattgttgtgtcctatgtacaaattgtctgctccattctaaagttttcatctacacggggaatagccaagatcttttccacctgtggctcccacctgtctgtggtctcactgttctatgggacaattattggtctctacttatgcccatcaactaataactctactgtgaaggacactgccatggctatgatgtacacagtggtgactcccatgctgaatcccttcatctacagcctgaggaacaaagatatgaaagaggccctgattagagtcctttgcaagaaggaaatatctttataa

SEQ ID NO: 106 - DNA, 936 bp, Mus musculus
  MOR135-4
atgataatgaataacaaaactgtcatcacccagtttattctcctgggcctgcccatcctgccagagtaccagcacctgttctatgccctgttcctgtccatgtacctcaccaccatcctggggaacctcatcatcatcatcctcattcaactggactcccatctccacacacccatttacttgtttctcagcaacttgtccttctctgatctctgcttttcctctgtcacaatgcccaagttgctgctgaacatgcagagccaggacacatccatcccctatgcaggttgcctgacacaaatgtacttttccaatctttttggaagcctggaaatcttcctccttgtgatcatggcctatgaccgctatgcggccatctgccttccccttcactacaccagcatcatgagccccaagctctgtgtttgtctggtgctgctgtcctgggtgattagtatgctgtattccatgttgcacactctactcttggctagattgtcattctgtgaggacaatgtgatccctcacttcttctgtgacatatctgcactgctcaagttggcctgctctgacattcatattaatgaactaatgatatttttcttaggagggccccttactgtcatcccattcttactcattgttgtgtcctatatacaaattgtcttctctattctaaagatttcatctactcgggccatacacaaggtcttctccacctgtggctcacacctgtctgtggtctcactgttctatgggacaattattggtctctacttatgtccatcagctaataacttttcagtgaagaaggcttccattaccatgatgtacacagtggtgactcccatgctgaaccctttcatctacagcctgaggaacagagatataaaagaggcccttgtaagagtccttataaagaaaatatcattataa

SEQ ID NO: 107 - DNA, 948 bp, Mus musculus
  MOR186-1
atggatacgtacaatcttacagtactgaagtatttcattctaaccggaatcacagatctccctgaactgcaggcccctttatttggactcttcctcattatatacatgatctctgttgtaggtaatttgggcttgatcatcctcacaaaaatagactctagacttcagacacctatgtacttcttcctcagacagctctctctcactgaccttggttattcaactgctgtggggcctaagatgttaataaattttgttgctgatcaacctacaatttcctataattggtgctcagtccagctgaccttcttcagcatatttatcaccactgaagttttcattctgtcagccatggcctatgaccgctatgtagccatctgccatccactactgtacacaatcatcatgtcacaaagattatgtcatgttctggtggcaataccttacctctatagtgtttttatatctttatggaccattatcaagattttcacttcatcattttgtggccataatatcatcaggtatttctactgtgacagtctgccgttgatattgatgttatgctcagacacacatgaaattaagctgataattttaatctttgcaacttttaatttgatttcttctcttctggtagtctccatatcttatatcttgatccttgtgtccattctcaggatgaactcttcagagggcaggcacaaggccttctcaacgtgtggctctcatctgacagtgatagttatattctatggtactctatttttcatgtatgcacaaccaaaatccattcactcctttgagactggtcaagtcgcatctttgttctatacactggttatccccatgctgaatcctatgatctacagtttgaggaaccaagaggtgaagcaggccttgaatagaaaatggaaaatgtgtgtgaatattctatttaaattgtaa

SEQ ID NO: 108 - DNA, 942 bp, Mus musculus
  MOR188-1
atggagaaatataatcttacaatagtgactgaattcatcctggtgggcatcactaaccaccatgagtttcaggtaccattgtttggactgtatctcatcatttatctgacctcactggtcgataacttgggcatgataatccttaccatagtggattccaggctgcaaacacccatgtacttctttctcagacacctcgctactactgaccttggttattcaacagctgtgggaccaaaaatgttgagaaattttcttgtagatcaaaatataatatcattttatgcctgtgctatccaatcatctttctttggtatgttcattgtttgtgaattttttattctttctgcaatgtcttatgaccgttatgtggccatctgtaaaccactcctctacactgtcatcatgtcacaaaaagcatgttggatactagtcaccattccctatctctacagtataattgtctcacttctagttaacataaagattttcactttatccttctgtggctacaatgtcatcagtcatttctactgtgatgctctccctttgttaactttggcctgctcaaacacacatgaaattgaggcaataattttaatcttctcagcttttaatttgctttcgtctcttcttatagtaattgggtcctatctacttatccttatggcaattctaaggattaactctactgagggtaaatggaaggctttctctacgtgtgggtcccacctgacagttgtcatcgtcttttatgggactttgatatgtatgtatttgcaacctacatccactcactccattgacactggtaaagggacttccatcttttacacccaggttatccctatgttgaaccccttaatatacagcttgaggaacaaagatgtgacagatgtccttaaaaaaacaaaggaaaaagtgtacaatcttgtctcatag

SEQ ID NO: 109 - DNA, 939 bp, Mus musculus
  MOR188-2
atggagaaacgcaacctcacagtagtgactgaattcatactgatgggcatcactgacaggcctgagcttcaggctccattgttcggcttgtttctcatcatctatctgatctcactgttgggcaacatgggcatgatcatccttaccatggtggactcccgattgcaaacacccatgtacttctttctcagacatctggctatcactgatcttggttattctacagctgtgggacccaaaatgctggaaaattttgttgtcaatcagaatacaatcagtaatcatctttgtgcaatacagctaactttctttcttgtgttcatcatttgtgaactctttattctctctgcaatgtcctatgaccgctatgtggccatctgtaagcctctactctatactgtcatcatgtcccatagggtatgctgggtcctagtggcagttccttatttctatagtgtcattatttctcttctaataactataaaaatttttgctttacctttttgtgattacaggatcgttagtcatttctgcgatagtctccctttaatatcattgctctgttctaatacacatgatattgaaattataatattgatttcagcggggtttaatttggtttcatctctcgtggtactcctcttttcttatctactcattcttatagccatttttagaatgaattcagctgaaggcaggcagaaagctttgtctacttgtggatcccacttgacagtggtcattgtcttctatgggactttgatatttatgtatgtgcagcccaaatcaagtcactcatttgacactgataaggtggcttccatcttttatactctgattatccccatgttgaatcccttgatctatagtctaaggaacaaagatgtaaaatatgccctagaaaggttgtggaaaatgttaggcaatattttttcttaa

SEQ ID NO: 110 - DNA, 942 bp, Mus musculus
  MOR185-2
atggaaaatcagaacctctctgtgctgaatgagttcatacttgtgggcatcacagatcgccctgaactacaggctcccttttttgtactattctttctcatctatgttgcctctgttgtgggaaatttgggcatgattgtccttaccaagttggatgagaggttgcaaacacctatgtacttttttctcagacatctagctttcattgattttgggtattcaacagctgtgggaccaaaaacgttggtaagctttgtaacaaataaaaataccatcccctataattggtgtgcattccagctatctttgttcatcttcttcatcattagtgagttatttgttctgtcagctatggcttatgaccgctatgtggccatttgcaacccgctgctctatactgtcatcatgtcacagaaagtctgctgggtattggtgacaattccttatctcttcagtgcctttctttctctgatcaccaccatcaaaatttttatttcatccttctgtggctataatgttattagccatttttattgtgacagtcttcccttactgaccttgatctgttcaggcacacgtgacgttgaacttatcatattgatcttctcggcatttaatttgatttcatccctttctgtagttctcgtgtcctatacctttatcctggtggccattctcaggatgaactctgcagaaggcagacataaggctttctctacctgtgggtctcaccttacagtggtagttatattgtatgggactctgtcttttatgtatatacagcccaaatctagccactcttttgagaatgataaaatggcctctgtgttctacaccttggtaattcctgtgctaaatcccattatctacagcttgagaaataaagaggtaaaaggtgcccttcaaaagctatggaaaaatgtctgtaaagtttgtatttaa

SEQ ID NO: 111 - DNA, 948 bp, Mus musculus
  MOR185-2
atggctcctagaaatttatctcatgtcactgagttcattcttgtcggtgtttcagaccttccagaacttcaggttccacttttctttgtcttcctagttatctaccttctgacagcagcagggaacctgggcatcatcaccctgacctccgtggactcacgcctgcaaactcccatgtacttcttcctcagacacctggcggtcatcaactttggcaactccactgtcattgctcctaaaatgctggtcaacttcttagtcagtaagaaaaccactttatactacgaatgtgccactcagctgggaggattcctggttttcattgtagcagagatctttatgctcgctgtgatggcctatgaccgctatgtggccatctgcaacccactgctctacatggtggtggtgtctcgacgggtctgccttctgttggtgtccctcacatacttctatggcttttgcactgccattgtcgtttcatcctgtgtgttctctgtgtcttattgctcctccaaaaaaataaaccatttttactgtgataatgtccctctcttggcactttcctgctctgacacctaccttccagaaactgtagtctttatatctgcagctacaaacctgttcttttccatgagtatagtgttggtatcttatttcaacatcgtgttgtctatcctaaggatccgttcagcagaaggaaggaaaaaagccttttccacctgtgcttcacatatgatggctgtcacagttttctatgggacactgttgtttatgtatttgcaacctcaaactaaccactcactagatactgataagatggcctctgtgttttacaccttggtcatcccaatgctgaaccccatgatctacagcctgaggaacaaggatgtgaaggctgctttaaagagattcatgacaaatccatgtgattcttttaaatcactgtaa

SEQ ID NO: 112 - DNA, 927 bp, Mus musculus
  MOR187-1
atggggcaaccaaatataacaatgccaactgagttcatcctgatgggagtcacacagactgctgagctgaaactcccactgtttgcagtcttcctcactatctatgcaatcaccgtggtgggaaacctcggcatgatcattttgaccaaactggactctcgcctacaaacccctatgtactttttcatcagacaccttgctttcattgatcttggaaattccactgccatctgccccaagatgctggtgaattttgttgtggataaaaacaacatcacctattatgcttgtgccacacaaatggcatgcttcattctgttcattgtcagtgaattttcaatcttgtcctccatggcctatgaccgctatgtggctatctgcaaccctctgctctatagtgctataatgtctcagagacgctgtcaagtgctcattggaattccatatctctacagtatcttccaggctctgctgttccctattaggtatttcacattaagcttctgtggtgctaatgttataagccatttctattgtgatgttgtccccttactacctttgatctgttcacatgtagaagagacagaattattgactatactgttttcagccttcaatttaatctcttctcttcttgttgttcttttgtcttacatgctaattttgttaaccatatttcgaatgcgttctgcagaaggtaggaaaaaagctttctccacttgtggttcccatctgacagtggtggttgtgttctacggttctctactcttcatgtatgttcagcctaaatctgctcactcatttgaatatgacaaagcagcatctgtgttttatactttagtgatccccatgcttaaccccttgatttatagtttaaggaacaaagaggtaaaaaatgcctttcatagagtatttaagaatctatga

SEQ ID NO: 113 - DNA, 933 bp, Mus musculus
  MOR180-1
atggataaagaaaatcactcagttgtgactgaatttgtctttatgggcataactcaagaccctcagctgcagatcatcttttttgtggtcttcctccttgtctacctggtcaatgtgatagggaatgttggtatgatcatcctgatcataacagacagtcagcttcacacccccatgtactttttcctctgcaacctctcctttgttgacctgggctactcatcagctattgctcccaggatgctggctgattttctaacaaagcacaaagttatctctttttccagctgtgccacccagtttgctttctttgtaggctttgtggatgctgagtgctatgtcctggctgcaatggcctatgaccgctttgtggccatctgcagacctcttcactatagcactctcatgtccaagaaagtctgcttggtcctaatgctgggctcttacttcgctggcctagtgagtttagtggcgcatacttctctcactttcagcctcagttactgtggttccaatatcatcaaccatttcttctgtgaaatcccaccactcttagctctctcttgctcagatacctacattagtgagatactgctgtttagtttgtgtggcttcattgagttcagcaccatccttatcatcttcatctcctatgccttcattctcattgccatcatcagaattcgatcagctgaaggccggctaaaggctttttccacctgcgggtctcatcttactggtgttacccttttttatggtacagtcatgttcatgtatctgaggccaacatccagttactccctggaccaagacaagtgggcctctgtgttctacacaattatcattcctatgctgaaccccttgatctacagtttgcggaacaaggatgtgaaagccgctttcaagaaactgattggaaagaagccacaataa

SEQ ID NO: 114 - DNA, 963 bp, Mus musculus
  MOR187-2
atgtcttttcagaaggttgaaatgagccacaggaactcaacagtgccagatgaattcattctgacaagaattacacacaggcctgagctgcagcttctgcttttgggcgtcttcatagtcatctacggagttgccatgataggcaacatgagcatgatcattttgaccaagttggactctcgccttcacacacctatgtattattttatcagacacctggctttcattgatcttggaaattgcactgtcatttaccccaagatgatggtaaattttgtggtggaacaaaatgtcatctcttactatgcttgtgccgtgcagatggcattctacattgcattcatcatcagtgaactgtttatattgtctgcaatggcctatgatcgctatgtggccatctgcaatcctctgctctacagtgcaatcatgtcgcagagacgctgtcatgttctggtgggcattccctatctctacagtgtcttccaagctgtgatgataactagtaagatttttacattgactttctgtgactctaatgtcattagccatttctactgtgacaatgtccctatgttacttttactgtgttcaaatgcaagggatatagaactgttgatcatattattttcagcacttaatttgatctcctccctctttgtagtcttagtatcttaccttcttattctactggccatatatagaatgcattctgcagatggaaggaaaaaggccttttcaacttgtgggtctcatctgacagtggtagtagtattttatggaactctactcttcatgtacttacagcctaaatccacacactcctttgaaactgacaaaatagcctctgtgttttatactttagtgattccaatgcttaatcccttgatctacagctttagaaacaaagaagtgaaaaatgctgttctaagagtctttaggtatcaatgcaaactttgtacttaa

SEQ ID NO: 115 - DNA, 960 bp, Mus musculus
  MOR185-3
atggctgaagtgaacatctcctatgtcagtgaattcattctaaaggggatcacagacaggccagaactccaagccccatgttttgtgatgtttttgacaatctatctagtcacagttttaggcaaccttgggttgattgtcataatcagggttgactctcgactccacacacctatgtacttctttctcagtcacctagcctttgttgacctgtgttactcatccgctatcacaccaaagatgatggtgaactttgtggtagagcgcaacactatccctttccatgcttgtgcaacacagctgggctgttttcttaccttcatgattacagagtgtttccttctggcctctatggcctatgatcgctatgtggccatctgcagccccctgcattattcaacactgatgtcaaagagagtgtgcattcaattagtggccgttccttatgtgtacagctttctagttgcccttttccatacaatcatcacctttcgcttgacatattgtggacctaatgtaatcaaccatttctactgtgatgaccttcccctcttagctctgtcctgctcagacacgcacatgaaggaaattctcatatttgcttttgctggctttgatatgatctgctcctcttccatagttctcacctcctacctctttatcattgctgccatcctgagaatccgctctacccagggaagacgcaaggccatctctacctgcggctcccacatggtagctgttactattttttatggtacgctcatcttcatgtatctacagcccaaatccaaccattccctggacacagacaaaatggcttcagtgttttacacagtggtgatccccatgttgaaccccctcatctacagtcttaggaacaaagaggtgaaagatgcctctaagaaagctttggataaagggtatgaaaccttaaaaatattaagattaagtaaataa

SEQ ID NO: 116 - DNA, 960 bp, Mus musculus
  MOR188-3
atggggagacacaaccttacagtggtgactgaatttgtcctgatgggcatcactgaccgccctgagcttcaggccccattgtttggactatttctcattatctatctaatttcactgataggaaacttgggcatgatcatcctcaccacagtggactccaagctacaaacacctatgtacttttttctcaaacatctggcgattacagatcttggttattctacatccgtgggacccaaaatgttagtaaattttgttgtggatcaaaatacaatatcatttaaactttgtgccacacagctttctttctttcttgtgttcattgtcagtgagctctttattctgtctgctatgtcctatgaccgctatgtggccatctgtaagcctttgctctatactgtcattatgtcacaaaagttatgttgggtactagtggcaattccttatctttattgcacatttgtttctcttctagtcacagttaagattttcactttgtctttctgtggctacaatgtcatcagtcatttctactgtgacagtctccccttgttacctctgctctgctcagatacacatgacattgaactgataattttaatcttagcagcctttgatttgatttcatctcttctggttgtccttgtgtcttacctgctcatcctcatagccattgtgaggatgaactctgctgagggcaggcggaaggctttctccacctgtgggtcccacctgacagtagtcattgtcttctatgggactttgatatttatgtatgtgcagcctaattccagccactcctttgaaactgataaagtggcttccatattctacacactggtgatccccatgttgaatcccttgatatatagtttgagaaacaaagatgtaaaatatgctctgaaaaggacattgaataatttgtgtaagttattttctttggcatttcataaaatatag

SEQ ID NO: 117 - DNA, 945 bp, Mus musculus
  MOR185-4
atggctcagataaactgcacccaggtgacagagttcattcttgtgggcctcacagatcgcgaggagctgaagatgcctctctttgtggtattcttatccatctatcttttcacaacacttggcaacctgggactgatcctagtcattagaacagatgcaagactccacacaccaatgtacttcttcctcagcaacctggcttttgttgatttctgctactcgtctgtcattacacccaagatgcttgggaatttcttgtacaaacaaaatatgatatccttcaatgcatgtgctgctcagttaggctgtttcctagcctttatgacagctgagtgtttgctcctggcttccatggcctatgacaggtatgtggccatttgtaaccctctactctatatggtcctaatgtccccaggaatctgctttcagcttgtagctgccccctatagctacagcttcctggtagcactgtttcatgccatcctcacctttcgcctctgctactgtcactccaatgccatcaatcacttctactgtgatgatatgcctctcctcaggctaacttgctcagacactcactccaaacagctatggatctttgtctgcgctggcatcatgttcatttcctctcttctcattgtttttatttcctacacattcattatttctgctatcctaaggatgcgttccgcagagggtagacgcaaggctttctccacatgtggttcccatatgctagcagtgaccattttctatggaaccctcatctttatgtacttgcagcccagttctaatcactctctagatacagacaaaatggcttctgtcttctacacagtgatcattcctatgttgaaccccttgatctacagcctcaggaacaaggaagttaaggatgccttgaagaaattaattgccagtaaaaaccaaatgttatcgtcatga

SEQ ID NO: 118 - DNA, 939 bp, Mus musculus
  MOR172-1
atggctactgagaactgtacagttgttactgagttcattcttttaggactgactgatcgtgctgaattgaaaatgatgctctttgttttatttctggtgatttatgctgttaccttgttagggaatctgggcatgattctgttaatccgcattactcccaaactccacacaccaatgtactttttcctcagttgcctatcatttgtagatgcctgttattcatcagtcattgcaccaaaaatgttgattagtttcttggtagtaacagaaaccatctctttctctgcctgcatcatgcaacatttatttttcggagtgctggttaccaccgaaggcttcttgctgtcagtgatggcttatgaccgttatgtggcagttgttaacccattgctgtatactgtgtccatgtctaagcaaaagtgtatcatgatggtcactgggtcagtcataggtggaactataaactctttgacacacaccataagtttgagtaagctgtctttttgtggacctaatatagtgggtcacttcttctgtgacataccatcgctgctgatactctcatgttctgatacctccatgaatgaatttctgctcttgatcttctctggagttatcgccattggtactctcttgattgtgttcatatcctatttattcattgctctggccattttgagaatacgctcagcttctggacgacaaaaagccttctccacttgtgcttctcacctgactgctgtcactatcttctatggcaccttaagctttaattacattcagccaagctcccagtattctgtagaacaagagaaggtggtgtcggtgttctatacactggtgattcctatgttaaatcccatgatttacagtctcaggaacaaagaggtgaaagaagctgcaaagagagccatagagatgaagtccttctcatgttaa

SEQ ID NO: 119 - DNA, 906 bp, Mus musculus
  MOR135-5
atgataataaataatcagactgccatccctcagttcatcctcctgggcctgcccatcctcccagagcagcagcaaatgttctatgccctgttcctggccatgtacctcaccactgtcctggggaacctcatcatcatcatcctcattcgactggactcccatctccacacacccatgtacttgtttctcagcaacttgtccttctctgatctctgcttttcctctgtcacaatgcccaaattgctgcagaacattcagagccaggacccatccatctcctatgccgggtgcctgacacaaatgtactttttcatggtttttgcaaacacagagaatgttcttcttgtggtcatggcctatgaccgctatgtggccatctgcttccctcttcattacaccagcatcatgagccctaagctctgtgtgtctctggtggtgctcacctgggtatttaccgttctgtattccatgttacacaccctactcttggcaagattgtcattctgtgaggacaatgtgatcccccactttttctgtgacatatctgttctgctcaagttagcttgctctgacacttatattaatgaactaatgatatttatcttgggagggcttgatattgtgataccgttcatactcattgttgtttcctatgtacaaattgtctgctccattctaaagttttcatctacacggggaatagccaaggtcttttccacctgtggctcccacctgtctgtggtctcactgttctatgggacaattattggtgtctacatatgcccatcagcaaataactctactgtaaaggagattgtcatggctctgatgtacacagtggtgacacccatgctgaatcccttcatctacagtctgagaaacagagatatgaaagaggccctgatc

SEQ ID NO: 120 - DNA, 939 bp, Mus musculus
  MOR135-6
atgactggaaacaaccaaactttgatatcaaagttcctccttctgggtctgcccatcttgtcagagtatcatttcctgttttatgccctgttcctggccatgtacctcaccactatcctgggaaacctgctaatcattgcccttgttcgactggattcccatctccacacaccaatgtacttgtttctcagcaacttgtccttctctgatctctgcttttcctctgtcacaatccccaaattgcttcagaacatgcagagccaagtaccatctatatcttatgttggctgcctgacacagctgtacttctttatggtttttggagatatggaaagctttcttcttgtggtcatggcctatgatcattatgtggccatctgctttcctttgcattacaccagcatcatgagtaccaagttctgtacttcactagtgctactactgtggatgctgacaacatctaatgccatgatgcacaccttgctcatggctagattgtctttttgtgagaagaatgtgattctccactttttctgtgacatttctgctcttctgaagttgtcctgctcagacacttttgttaatgagttgatgatatttatcatgggaggtatcattattattattccattcctactcattgttatgtcctatgtaaggattttcttctccattctcaaggtcccatctacacagggcatccacaaggtcttttctacatgtggatcccatctgtctgtggtgtctctgttctatggaacaattattggtctatacttatgcccatcaagtaataattccactgtaaaagagagtgccatggctatgatgtacacagtggtgactcctatgctgaaccccttcatctacagtctgaggaacagagacatgaagagagccctaataagagttatctgcagtaagaaaatctctctgtaa

SEQ ID NO: 121 - DNA, 939 bp, Mus musculus
  MOR135-7
atgaaaatgaacaacaaaactgtcatcacccagtttctcctcctgggactgcccatttccctagagtacaaacacctgttctatgccctgtttctggccatgtacctcaccactgtcctgggaaacctgctaataattgtcctcattaaactggactcccatctccacacaccaatgtacttgtttctcagcaacctctctttctctgacctctgcttttcctctgtcacaatgcccaaaatgctgcataatatgcagagccaggacccatccatcccctatggagggtgcctggcacaaatatacttccttatggcttttggagatatggagagctttcttcttgtggtcatggcttatgaccgctatgtggccatctgcttccctctgcattacaccagcatcatgagccccaagctctgtacttgtctaatgctgctactgtggatactgacgacatcacatgccatgatgcacaccctgcttgcagcaagattgtctttttgtgagaacaatgtgatcctcaactttttctgtgacctatttgctgtcctaaagctgtcctgctcagacacttatattaatgatttgatgatacttatttttggaggactcatctttattattccattcctcctaattgttatatcctatgcaaggatcatctcctccattcttaaagttccatctactcaaggcatatacaaggtattctccacctgtggttcccatctgtctgtggtatctttgttctatgggacaattattggtctctacttatgtccatcaggtaataattccactgtaaaagaaattgctatggccatgatgtatacagtggtgactccaatgctgaaccccttcatctatagcctgaggaacagagacatgaagaaggccctaataagagtcatctgtagtaagaaaatctctctttag

SEQ ID NO: 122 - DNA, 933 bp, Mus musculus
  MOR135-8
atgaacaacaaaactgtcatcacccagttcctcctccttggcctgccaatccctccagagtaccaacacctattctatgccctgtttctggctatgtacctcactaccatcttgggaaacctgctaatcattgtcctcattcaactggactcccatctccacacaccaatgtacttgtttctcagcaatttgtctttctctgacctctgcttttcctctgtcacaatgcccaaattgctgcagaatatgcagagccaggacccatccatcccctatggaggttgcctggcacaaatattcttctttatgctttttggagatatggaaagcttccttcttgtagccatggcctatgaccgctatgtggccatctgcttccctctgcattacactagcatcatgagtcctaaggtctgtacttttctagtgctactgttgtggatactgacaacatcacatgccacaatgcaaattctgctcacagtaagactgtctttttgtgagaacaatgtgcttctcaactttttctgtgacatatttgttctcttaaagctggcctgctcagacacttatgttaatgatttgatgatacttatcatgggagggctcatcattgttattccattcctgctcattgttatatcctatgcaaggatcatctcctctactcttaaggttccatctactcaaggcatccacaaggtcttctctacctgtggctctcatctgtctgtggtgtctctgttctatgggacaattattggtctctacttatgtccatcaggtaataatttcagtctaaaggggtctgccatggctatgatgtacacagtggtgactcccatgctgaaccccttcatctacagtctgaggaacagagacatgaagagggccctaataagaattattggcagtaagaaaatctctctgtaa

SEQ ID NO: 123 - DNA, 939 bp, Mus musculus
  MOR135-9
atggctggaaacaaccaaactttcatcttggagttcctcttccttggccttcccatcccctcagagtaccagctgttgttcaatgccctgttcttggccatgtacctcaccactctcctgggaaacctgctaatcattctccttgttcaactggactcccatctccacatgcccatgtacttgtttctcagcaacttgtccttctctgatctttgcttttcctctgtcacaatacctaaattgcttcagaacatgcatagccaagtaccaacaatatcctatgcagattgcctgacacagctgtacttctttctggtttttggagacatggagagctttcttcttgtggccatggcctatgaccgctatgtggccatctgctttcctttgcattataccagcatcatgagcaccaagctctgtgtttcactagtgctactactgtggatgttgactatattccatgccctgctgcataccctactcacagctagattgtctttctgtgagaagaatgtgattctgcactttttctgtgacctaccagctcttctgaagttgtcctgctcagacacttttgttaatgagttgatgatatttatcctgggagggatcatcagtattattccgttcctactcattggtatgtcctatgtaaggattttcttctccattctcaaggtcccatctacccagggcatccacaaggtcttctccacctgtggatcccatctgtctgtggtgtctctgttctatgggacaataattggtctatacttatgtccatcaagtaataattctactctgaagaaaactgccatggctttgatgtatacattggtgactcccatgctcaaccccttcatctacagccttaggaacagagacataaagagggccctaataagagttatcagtagtaagaaaatctctctgtaa

SEQ ID NO: 124 - DNA, 939 bp, Mus musculus
  MOR135-10
atggctggaaagaaccaaactctcatcttggaattcctcctcctgggtctgcccatctcatcagagtatcatctccttttctatgccctgctcctggccatgtacctcaccactctcctgggaaacctgctaatcattctccttgttcgactggactcccatctccacacgcccatgtacttgtttctcagcaacttgtccttctctgatctctgcttttcctctgtcacaatacctaaattgcttcagaacatgcagagccaagtaccaacgatatcctatgcagattgcctgacacagctgtacttctttatggtttttggagatatggagagcttccttcttgtggtcatggcctatgaccgctatgtggccatctgctttcctttgcattataccagcatcatgagcaccaaattttgtgctttactagtgctactactgtggatgctgacaatatcccatgccctgctgcataccctactcatggctagattgtctttttgtgagaagaatgtcattcttcactttttctgtgatatttctgctcttctgaagttgtcctgctcagacacttatgttaatgagttgatgatatttatcatgggagggatcatcagtattattccatttctactcattgttatgtcttatgtaaggatttttttctccattctcaaggttccatcttctcaggacatccacaaggtcttctctacctgtggttcccatctgtctgtggtgaccttgttttatgggacaattattggtctctacttatgtccatcaggcaataattctactgtgaatgagatttccatggccatgatgtacacagtggtgactcccatgctgaaccccttcatctatagactgaggaatagagacatgaagagggccctaataagagttatcttcagtaagaaaatctctctgtaa

SEQ ID NO: 125 - DNA, 936 bp, Mus musculus
  MOR255-1
atggatctgggaaccttgggaaacgattcctgtgtgagcacatttgtcctactgggtctcacagagactccagttttgcggcccatcctctttgtcatcttccttcttgcttatgtagctacgcttggtggcaatttcagcatcctggctgctatcattatagagcccaaactccacactcccatgtatttcttcttggggaacttgtctatgctggatgttggatgcattagtgtcactgttcctgccatgttgaaacattttctatccaatgacagacacattccctatggggcctgcctctcacagctcttcttcttccatctcctggctggggcagactgcttccttctgactgtcatggcctatgatcgttatctggctatctgccaccccctcacctacaacacccatatgagttggaggattcagaaggcctcagtgtgcctgtcatgtgtgttttcctttagtaatgcactgacccaaactgttgccttatctactcttaaattctgtggtccaaacacaatcaaccacttctactgtgacctccctcagctctttcagctttcctgttccagcatccaactcaatgagcagctgctctttgtagcagcagccttcatgggtgtggtccccttggtcctcattactgtgtcatatggccatgtggcagctgcagttcttcgtatccggtctgctgagggcaggaagaaagccttctctacctgcagctctcatctcactgtggtaggcatcttctatgggacaggggtcttcagctacatgcgtctggggtcagtggaatcttcagacaaggacaaaggcattggcatcctcaacactgtcatcagtcccatgctgaacccacttatctacagccttaggaaccctgatgtgcagggtgccctatggaaggtgctcacagggaggtag

SEQ ID NO: 126 - DNA, 948 bp, Mus musculus
  MOR255-2
atggagccaggtgcctggggaaacaggacagctgtcacggatttcatccttcttggcttaacaggaaatgtaagactgcaacctatcctttttgttgtcttcttctttgcctatattgtcacagttgggggtaacctcagcatcttggccgccatctttgtggaacccaagctccacactcctatgtactacttcttggggaatctatctctgttggacatcggatgcatcagtgtcactgttcctccaatgcttgtgtgtctcctggctcatgagtgcagagttccctacgctgcctgcatttcacagctcttttttttccacctcctggcaggtgtggactgtcatctcttgacagccatggcctatgaccgctacctggccatctgccagcccctcacctacagcacccgcatgagccgtgaagtgcagggcacactggtgggtatttgctgtactgtctccttcattaatgctctgactcacacagtggcagtgtctgtgctggatttctgtggccctaatgtggtcaaccacttctactgtgaccttccacctcttttccagctctcctgctccagcatctacctcaatgggcaactgctttttgtgggagccactttcatgggagtagtccccatgatacttatctcagtgtcctatgcccacgttgcagctgcagtactacggatccgctccacagaggggaggaagaaggcattttccacatgcggctcccacctcactgtggtctgtatcttttatggaactggcttcttcagttacatgcgtctgggttctgtctcagcctcagacaaggacaagggcattgggatcctcaatactatcctcagccctatgttaaacccactcatctacagcctccggaacccagatgtacagggtgccctgaagagggtgctgacaggaaagaggtatccagtgtga

SEQ ID NO: 127 - DNA, 927 bp, Mus musculus
  MOR184-1
atgactgaggacaactactccttgacaacagagttcatcctcataggattctcagaccacccagacttaaagatacttctattcctggtgttctctaccatctatctggtcaccatggtggggaatcttgggctggtggccttgatctacatggagcctcgtctccacacacccatgtacatctttctgggcaacctggctctcatggactcctgctgctcctgtgccatcactcccaagatgctagagaactttttttctgtgaacaaaaggatttctctctatgaatgcatggcacagttctattttctctgtcttgctgaaactgcagactgctttcttctggcagccatggcctatgaccgctatgtggccatatgcaacccactgcagtaccacaccatgatgtccaagaagctctgccttcaaatgaccacaggagcctacatagcaggaaacctgcattccatgattcacatagggttcttgttcaggttaactttctgcaggtctcatgtgatcaagcacttcttttgtgatgtcctccccctatacagactctcatgtgttgacccttatatcaatgaactgatgatactcatcttttctggttcagttcaaaccttttccattattatagtcttgatttcttatttctgcatcatttttactatattcacaatgaagtccagagagggaagaagcaaagccttatctacttgtgcatcccactttctgtctgtgtcaatattctatgggtctcttctctacacatatattcgaccaagttctatcaacgaaggaaatgaagacatacctgttgctattttttatactctggtaattcctttattaaacccctttatttatagtctgagaaataaggaagtaattaatgcaattaaaagaaccatgaacaaaggatga

SEQ ID NO: 128 - DNA, 930 bp, Mus musculus
  MOR184-2
atgcttgaaggaaaccacacaatgaaacatgagtttatcctcacaggatttacaaaacaccctgaaatgaagggccttctatttgcagtattctttttcatctatctgattaccatgatagggaatatgggcttggtgattctgatttgcacagaacgttctcttcacaccccaatgtacatctttctgggcaacctggcttttatagattcttgttgtgcctgtgctattacccctaaaatgttggagaactttttttctgaggacagaataatctctctgtatgaatgtatggcacagttttattttctgtccactgttgaaactgcagactgctttctcctgtcagcaatggcctatgaccgctatgtggccatatgcaacccactgcagtaccacaccatgatgtccaagaagctctgccttcagatgatcacgggagccttcatagttggaaacctgcattctatggttcatgtggggctattatttagactagcattctgtgggtctaatcaaatcaaccacttttattgtgatattcttcctttgtacagactctcctgtgttgacccctatgtcaatgagcttgtattgcttgtcttttcagccccaatccaagttttcacaataagttgtgtcctcatatcttaccttttcattgtttatacaattttccaaatgaaatccaaagagggaaggatcaaagccttctccacctgtgcatcccactttctgtctgtttcactattctatggatctcttttctttatatacattaaaccaaatttgctagaagaaggtgataaggacatgccagctgctattttgtttacaatagtagttcccttactaaacccatttatttatagcttgagaaataaagaagtaaagaatgtcttgcagaaaattctgcagaaaaacaaataa

SEQ ID NO: 129 - DNA, 966 bp, Mus musculus
  MOR184-3
atggttgaagaaaaccacaccatgaaacgtgagtttgtcctcacaggatttacagaccaccctgaaatgaagggccttctatttgcagtattctttttcatctatctgattaccatgatagggaatatgggtctggtgattctgatttccaaagaacgttctcttcacaccccaatgtacatctttctgggcaacctggcttttatagattcttgttgtgcctgtgctattacccctaaaatgttggagaactttttttctgaggacagaataatctctctgtatgaatgtatggcacagttttattttctgtgcactgttgaaactgcagactgctttcttctgtcagcaatggcctatgaccgctatgtggccatatgcaacccactgcagtaccacaccacgatgtccaagaagctctgccttcagatgacgacgggagctttcatagctggaaacctgcattctatggttcatgtggggctattatttagactagcattctgtgggtctaatcaaatcaaccacttttattgtgatattcttcctttgtacagactctcctgtgttgacccctatatcaacgagcttgtattatttgtcttttcaggctcaatccaagtcttcacaataggttgtgtcctcatatcttaccttttcattgtttatacaattttccaaatgaaatccaaagagggaaggatcaaagccttctccacctgtgcatcccactttctgtctgtttcactattctatggatctcttttgtttatgtacattagaccaaatttgctagaagaaggtgataaggacatgccagctgctattttgtttacaatagtggttcccttactaaacccatttatttatagcttgagaaataaagaagtaaagaatgtcttgcagaaaattctgcagaaaaaaataatttcaaaaaattttaaacaagcatctattattgtgtaa

SEQ ID NO: 130 - DNA, 954 bp, Mus musculus
  MOR184-4
atgatgaaggcaaatcactctttgacagtagagttcatccttataggattctcagatcacacagatctgaagacacttctgttcctgctgttctctgccatctatctggtcaccatagtggggaatcttgggctggtggccttgatctatatggagcctcgtctccacacacccatgtacatctttctgggaaatctggctctgatggactcctgctgctcctgtgccatcactcccaagatgctagagaacttcttttctgtggacaggaggatttctctctatgagtgcatggtacagttctattttttgtgtcttgctgaaactgcagactgctttcttctggcagcaatggcctatgaccgttatgtggccatatgcaaccctctgcagtaccacagcatgatgtccaagaaactctccattcagatgagtataggcacattcatagccagtaacctgcattccttgatacatacaggctgtctgttaagattaaatttctgtaaatctagaagaattgatcacttcttctgtgatattcttcccttgtataaactctcctgtacagacccatttatcaatgaactaatgttatatattttttcaatgccaattcaagtctttaccattaccactgtcttggtctcttacagctgcattcttctcactgttttcaagatgaaatccaaggatgggagaggaaaaacattttctacctgtgcatcccactttttttctgtgtcaatattctacatttgtcttctcatgtatattggaccatccaaaaatagtaacaaagacatacctgtagatgtattttatacaatagtaattcctttgctaaacccttttatttacagcctgagaaataaggaggtagtaaacgctgttaagaaagttatgaaaactcatagtatttttaaaaattcttcagcttctatagcacactaa

SEQ ID NO: 131 - DNA, 927 bp, Mus musculus
  MOR184-5
atggctgagaacaactattctgtgacaaatgaattcatcctggtggggttctcagatcacccagacttgaagacacctctgttcctggtgttctctgccatctatctggtcaccatggtggggaatctagggctggtggccttgatctatatggagcctcgtctccacacacccatgtacatctttctgggcaacctggctctgatggactcctgctgctcttgtgccatcactccgaagatgctagagaacttcttttctgtggacagaaggatttctctctatgagtgcatggtacagttctattttctctgtcttgctgaaactacagactgctttcttctggcagcaatggcctatgaccgctatgtggccatatgcaacccactgcagtaccacagcatgatgtccaagaagctctgccttcaaatgaccatgggatcctacatagcaggaaacctgcatcctatgattgaagtagggcttttgttgaggttaactttctgcaggtctcatgtaatcaagcactttttttgtgatgtccttccattatacagaatctcctgtactgatccaaatatcaatgaactgatattacttgtcttggcaggttcaattcaagtctttactatctccatagttctagtgtcttactcctgtatccttttcactatattcacaatgaaatctaaagagggtagaggcaaagccttatcaacatgcgcttcccactttctgtctgtgtcaatattctatgggtctcttctcttcatgtatgctcaaccacattcagccaatgaaggagacaaagatatgccagtagctattttttatactcttataattcctttgttaaaccctttcatttacagtctaagaaataaggaagtaataaatgtaatgaaaaaaactatgaaaaggagataa

SEQ ID NO: 132 - DNA, 960 bp, Mus musculus
  MOR184-6
atgagactagagaagacaaatcactctttgaccacacaattcatcctggtgggattctcagatcacccagacttgaagacacctctgttcctgctgttctctgtcatctatctggtcaccatggtggggaatcttgggctggtggccttgatctatatggagcctcgtctccatacacccatgtacatctttctgggcaacctggctctgatggactcctgctgctcctgtgccatcactcccaagatgctagagaacttcttttctgtagacagaaagatttctctctatgaatgcatggcacagttctattttctgtgtcttgctgaaacttcagactgctttcttctggcagcaatggcctatgaccgctatgtggccatatgcaaccctctgcagtaccacagcatgatgaccaagaaactctccattcagatgagtataggcacattcatagccagtaacctgatttccattcttcatgtagggtgtctcttaaggttaactttctgtaaatcaaatcgcattgatcatttcttctgtgatattcttcccctgtatagactctcctgtacagacccatttatcaatgaattaatgatatatattttttcaatgccaattcaatttcttaccattaccactgtcttggtctcttacttctgcattcttctcactattttcaagatgaaatctaaagatgggagaggaaaagcactttctacctgtgcatcccactttttttctgtgtcaatattctatgcctgtcttctcatgtatattagaccatttgatgacagtaataaagacataccagtggccatattttatacaataataattcctttgttaaacccttttatttacagcctgagaaatactgaggtagtaaatgctgttaagaaagttatgaagatctataccatttttaaaaggtcttcagcttctgcagctcactaa

SEQ ID NO: 133 - DNA, 930 bp, Mus musculus
  MOR184-7
atgactgaggacaactactccttggcaacagagttcatcctcataggattctcagaccacccagacttaaagacacttctgttcctggtgttctctgccatctatctggtcaccatggtgggaaatcttgggctggtgaccttgatctacatagaacctcgtctccacacacccatgtacatctttctgggcaacctggctctgatggactcctgttgctcctgtgccatcacacccaagatgctagagaacttcttttctgtagacagaaggatttctctctatgagtgcatggcacagttctattttctctgtcttgctgaaactacagactgctttcttctggcagcaatggcctatgaccgctatgtggctatatgcaaccctctgcagtaccacagcatgatgtccaagaagctctgccttcaaatgaccacaggagcctacatagcaggaaacctacattccatgattcacatagggttcttgttcaggttaactttctgcaggtctcacgtaatcaagcacttcttttgtgatgtcctccccctatacagactctcatgtgttgacccttatatcaatgaactgatgatactcattttttctggttcacttcaaacttttaccattactatagtcctcatttcttatttctgcatcctttttactatattcacaatgaagtccagagagggaaggagaaaagccttatctacttgtgcatcccactttctgtctgtgtcaatattctatgggtctctcctctacatgtatattcgaccaagttcacttaatgaagggtataaagacatacctgttgctattttttatactctagtaattcctttattaaacccgtttatttatagtctgagaaataaagaagtaattaatgtgatgaaaagagcaatgaagaaaagattataa

SEQ ID NO: 134 - DNA, 924 bp, Mus musculus
  MOR182-1
atggcggaaagaaattggaccctggtgacagagtttgtcctcacaggactcactgagcgtcccgagttgcaggttccactcttcctggttttcctcatcatctacctcaccaccatggtgggcaaccttggactgattgctctcatctggaaggaccctcatctccacactcccatgtacgtcttcctcagcagcttggcctttgctgatgtttgcacctcatcctctgtgacccccaggatgcttgtcaattttttatctacagatcatgagatatccctggttgagtgcttcacccaattttactttttttgctccagtgcaaccacagaatgtttcctcctgctagtgatggcctatgaccgctatgtggccatatgtaaccccctcctttatccggtggtgatgtccaacaagctctgtactcagtttatagtcgttacatattttataggtgttctgaattcaacaattcacgtgggtttgctaattagattaacgttctgcaggtccaacgttatagactatttctattgtgaaattgtaaaactactcacaatttcttgcactgatccttcaattaacatgcttgtggtttttatttgctcaatctttatacaagcctccacacttgcaaatattgtagtctcctatacccgtgtgctctttgccattctgagaaagaagtctgagaagggcaggagcaaagccttctccacctgcagtgctcatctcctctctgtctctttgttctatggcactctcttcctcatctatatccttcctgggtctgagccagctgaagataaggaacaactgttatctatagtttacacaataataatcccattgctcaacccatttatttatagtctgaggaacaaagaggttctaggagctctaagaagactaataaagaaataa

SEQ ID NO: 135 - DNA, 927 bp, Mus musculus
  MOR182-2
atggcagaaggaaaccgcactctggtcactgagtttatcctcatgggactcaccgaccatcccacgctaaaggctgccctgttcccactgttccttgtcatctacctcatcaccatggtgggaaatctcggactgattgctctcatctggaaggactctcacctccacacccctatgtacttattcctcagtagcctggcctttgctgactcatgcactacatcctctgtgactcccagaatgattctcaactttttatctacaaatcatgagataaccctggttgagtgctttgctcaattttattttatgggttccagtgcaaccacggaatgctttctcctatctgtgatggcctatgaccgctatctggccatctgtaaccccttgctttatccagtgttgatgtctaatagactctgtactcagtttatagccgtggcatacttacttggtgctctgcacttggcaattcacgtgggtttgttacttagactgactttctgcagatccaacattatacaatattactattgtgaaattttacaacttttcaacatttcttgcattgatccaacaattaacgtgtttgtgcttttaatccttgcaacttctatacaagtcttcacatttgtaaccgtcttggtttcatatatccgtgtcctctttgccatcctgagaaagaagtctgataagggcagaagcaaagccttctccacatgcagtgcccatctactctctgtctctttgttctacggaactctttttctcatttatgtttgtcctgggtctgggcctgtgggagacaaagagaaaatgctttctttattttatacagtcataattcctctgctcaacccatttgtttacagtctgagaaacaaagaggttataagtgcttttagaagagtaatgaagaacacctga

SEQ ID NO: 136 - DNA, 957 bp, Mus musculus
  MOR184-8
atgactgaggacaactactccttggcaacagagttcatcctcacaggattctcagactacccagacttaaagatacttctgttcctggtgttctctgccatctatctggtcaccatggtggggaatcttgggctggtggccttgatctacatggagtctcgtctccacacacccatgtacatctttctgggcaacctggctctgatggactcctgctgctcctgtgccatcactcccaagatgctagagaacttcttttctgtggacagaaggatttctctctatgaatgcatggcacagttctattttctctgtcttgctgaaactgcagactgctttcttctggcagccatggccgatgaccgctatgtggccatatgcaaccctctgcagtatcatacaatgatgtccaagaagctctgccttcaaatgaccacaggagcctacatagcaggaaacatacattccatgattcaaatagggttcttgttcaggttgactttctgcaggtctcatgtaatcaagcacttcttttgtgatgtccttcccctgtacagactctcatgtgttgacccttatatcaatgaactgatgatactcatcttttctggtatagctcaaacttttaccattactatagtcctcatttcttatttctgcatcctttttactatattcacaatgaagtccagagagggaaggagaaaagccttatctacttgtgcatcccactttctgtctgtgtcaatattctatgggtctctcctctacatgtatattcgaccaagttcacttaatgaagggtataaagacatacctgttgctatttgttacactctaataattcctttactaaacccatttatttatagtttgagaaataaagaagtgattaatgtgatgaaagaacaatgcagagacaattgtaacattctgaaatcattctttgaaaattaa

SEQ ID NO: 137 - DNA, 918 bp, Mus musculus
  MOR182-3
atggaaaaaaacagcaccctgatgactgagtttgttctcagaggaataacagatcgtccagagcttcaagttcccctcttcctggtgttcttcttcatctacgtcaccaccatggtgggcaaccttggcttgatctttctcatctggaaggaccctcatcttcacacacccatgtaccttttccttggaaatttggcctttgctgatgcctgcacgtcatcctctgtgacaccaaagatgcttatgaaatttttaaataagaatgacataatatccaggggtgagtgttttgcccaattttattttttttgtttcagtgcaactactgaaattttcctcctggtagcaatggcctatgaccgctatgtagccatatgcaaccctctgctctatctagtggtgatgtccaagagactctgtactgtgttaatcagtttatcatatataattggtgttctaaatcctatagttcatgtgggattattattcagattaacattctgtaaatctaatgttattgatcatttctactgtgaaatcatgccactctatgcgatttcttgcacagatccatctcttaatggattggtggcttttatttttgcttcttctatacaaatcagtacctctgtgactatcgtagtctcttatgcgcgtgtcctttttgctgtcctgaacatgaagtctgagaggggcagaagaaaagcttttttcacctgcagtgcccacctgctctctgtctctttgttctatggtaccctcctcttcatgtatgtgagccctgggtctggatcaggtaaacaaaaggataaaatgtattctctgttctacacagttgtgattcctctgctaaacccctttatttacagcttaagaaacaaggaagttttgggtgctctaaagaaactcataaaatga

SEQ ID NO: 138 - DNA, 921 bp, Mus musculus
  MOR182-4
atggagaagaacagcaccctactgacagaatttgttctcagaggaataacagatcgttcagagcttcaagttcccctcctcctggtgttctttctcatctatgtcaccactatggtgggcaaccttggcttaatctttctcatctggaaggaccctcatcttcacacacccatgtaccttttccttggaaatttagcctttgctgatgcttgtatttcaaccacagtgaccccaaaaatgcttatgaaatttttaaataagaatgacatgatatctgtgggtgagtgttttgcccaatattattttttttgtatcagtgcaactactgaaattttccttctggtagcgatggcctatgaccgctatgtagccatatgcaaccctctgctctatctagtggtgatgtccaaaagactctgcactgtgttaatcagtatatcctatataattggttttgtaaactgtggacttaatataggattattatttagattaactttctgtaaatccaatataattgaccatttctactgtgaaatcttgcaactgtatacaatttcttgcacagatccatctcttaacacattggtcgtttttatttgtgcttcttccatacaaatcagtacctctgtgactatcatagtctcttatgcccgtgtcctatttgctgtcctgaacatgaagtctgagaggggcagaaggaaagctttcttcacctgcagtgcccacctgctctctgtttctttgttctatggtaccctcctcttcatgtacgtgagccctgggtctggatcaggtaaacaaaaggataaaatatattctctgttctacacagttgtgattcctctgctaaacccatttatttacagcttaagaaacaaggaagttttgggtgctctgaaaaaatttataaaatgttaa

SEQ ID NO: 139 - DNA, 948 bp, Mus musculus
  MOR266-1
atgctgactgggaagtctgtcctcaatcagtctgggaccactgagtttgtgttccgtgtcttcaccactgtccctgaattccaggctcttctcttcctcctcttcctcctgctgtatttgatgatcctctgtggtaatgcagccatcatctgggtagtgtgcacacacagtgccctgcacacacctatgtatttcttcctcagtagtctgtctgtcttggaaatcttctacaccacagatgtggtgcccttgatgctttctaacatctttggggcccagaaacccatatcactggctggttgtgggacacaaatgttcttctttgtaactctaggaagcactgactgctttctcttggcagtcatggcctatgacaggtatgtggccatctgccaccctctacactacagcctcatcatgaccaagaagctgtgtgtccagatggtgatgggctcttggagcttggcactgtttctctccctgcagctcactgccttaattttcaccttgcccttctgtggacatgaccaggaaatcaaccactttctctgtgatgtgcctccagtcctgcgcctagcctgtgctgacattcatgtgcaccaggcagtcctctatgtagtgggcatcctggtgctgacagtcccattcctgctgatttgtatctcatatgtgttcattgcttctacaattcttcgcatgcgctctgcagagggtcgccagagggccttctctacctgctcctcccacctcactgtggtcttgctgcagtatggttgctgcagccttgtatatctgaggccccgctccagcacctcagaggatgaggatcgccaaattgccctggtctacacctttgtcacgccattactcaatcctctgatttacacccttcggaataaagatgtgaaaggtgcactgaagaactccatcttccataaagcagtctga

SEQ ID NO: 140 - DNA, 954 bp, Mus musculus
  MOR127-1
atgaatatggatcaaggaaaccaaaccagcatctctgaatttatcctcctgggtctctccaaccaggctgagaagcaaaaactcatctttgtgattttcttgagtatgtacctggtcactgtgattggaaacagtctcataattctggccattggtttggatatacatcttcatactcctatgtatcttttccttgccaacctatcttttgctgatatttcctcctcttcaacttcagtccctaaaatgctaatgaatattcagaccaatagtcaatccatttcctatgagggctgcattacacaaatgtacttttctattgtgtttgttgtcattgacaattttcttttgggggtaatggcttatgatcgatatgtggctatctgccaccctctgaattatacaaacatcatgcaccccaggttctgtcttttactttctttctgtccatgggctctaagcaatattgttgccctgacacatactcttctggccaatcaattgattttttgcaaccataacaccatccaacacttcttctgtgacttggcccctctgatcaaactttcctgctcagatgcaatgatcaatgaacttgtaaaatttgttgtgggattatcagtcatcacctttccctttgccctcattctcttctcctatgtctgcatcatcagggatgtactgagaatttcatccacggaaggaaagtggaaagccttctctacctgtggctctcacctgacaattgtattccttttctatggtaccattgtaggggtttactttttcccttcatccactcaccctgaggacacagacaagattggtgcagtactcttcacagtggtgacacccatgttaaaccctttcatctatagcctgagaaataaggacatgaaaggtgcccttaggaagctcatcaataaaagtcatttgctccctttgatgtcatga

SEQ ID NO: 141 - DNA, 933 bp, Mus musculus
  MOR261-1
atggggggaaatcagaccttgatcacacagttcatcctcctgggatttcctctcagcccgaggatgcagatgctcctctttgccctcttctccctgttctatgccttcaccctgctgggaaatgggaccatcctgggacttatctgcctggactccagactccacactcccatgtacttctttctgtctcacctggccatcgttgacattgcctatgcctgcaacacagtgccccagatgctggtaaacctcatggatccagccaagccaatctctttcgctggctgcatgacacagacctttctctttttgacgtttgcacacacggaatgtctcctactggtggtgatgtcctatgatcgatatgtagccatctgccacccactccgatatactgctatcatgagctggagagtttgtgttatcctggtgctgacttcctggattttaggagtactcttggccctggtccatctagtattgttgttaccattacccttctgcggctcacaaaaagtgaatcactttttctgtgaaattatagctgttctcaaacttgcttgttcagatacccgcatcaatgagttaatggttttggctggggctgtgtctgtgcttgtcggaccattttcttcaattgtagtctcttatgctcatattctgtgtgccatcctgaagattaagtcacagcaggggcgccagaaagccttctccacttgctcctctcatctctgtgttgttggactcttttatggtacagccattgtcatgtacattgggcctcaacacgggaagtccaatgagcagaagaaatatctcttgctattccatagcctttttaatcctatgctcaaccccctgatctatagtctgaggaacaaagaggtcaaaagtgctctgaagaggacactcttaaaggaggacacctcttga

SEQ ID NO: 142 - DNA, 942 bp, Mus musculus
  MOR257-1
atgaagagagacaatgcaacctgggtaagtgagtttatcctcatgggtctctccagtgacaaacacatccaagctggactctttgtcctctttggggtcatctacctgttgactctgctgggcaatgggctcatcgtcctactgattgcactcgacccacgactccacctgcccatgtatttcttcctctgtcacctgtcagtggtggacatctgctacacctccagtggggttccccagatgctggcacacttcctcatggagaaaaagaccatctcttttgccctgtgtgggacccagctcttttttgctctgactcttgggggaactgagtttctgttgctggctgccatggcctatgaccgctatgtggctgtctgtaatccattacggtacacagtggtgatgaacccaaggctctgcatgggtctagcaggtgtctcttggtttgtgggtgtagttaattctgctgtggagacagcagtcaccatgagccttcccacctgtgggcacaatgtgctcaaccatgtggcctgtgagacactggcactggttagactggcctgtgtggacatcaccctcaaccaagtggtgatactggcttctagtgtggtggtactgctggtaccctgctccctggtctctctgtcctatgcccacattgtggctgccatcatgaagatccgttctacccagggacgccgcaaagcctttgagacctgtgcctcccacctgactgtggtctccatgtcttatgggatggccctcttcacctacatgcagccccgctccacagcctctgctgagcaggacaaattggttgtgctattctatgctgtggtcactcccatgctgaatcctctcatctacagtctgaggaacaaggatgtgaaggctgctttcagtcgagttctgatgaagaacattgagtcaaagaattag

SEQ ID NO: 143 - DNA, 954 bp, Mus musculus
  MOR257-2
atggaaaccaacaatgagacacagctgcatgaattcatccttcttggcctttccagtgactgggactctcaagtctccctcttcgtcctgttcttgctgatgtacctggtgacagtattggggaacttcctcatcattgttctgatcagactggacagcagactccacactcccatgtatttctttctcaccaacctgtccctggtggatgcatcttatgccacaagcatagtcccccagctgctggctcatttccttgccacacacaaagcaattccatttctgagctgtgcagcccagttatttttttccctgggcttgggtgggattgagttccttctgctggcagtgatggcctatgaccgctatgtggcagtgtgtgatcctctgaggtattcagtcatcatgcatgcagggctctgcacaaggctggtcatcacatcatgggtcagtggctccatcaactctcttgtgcacactgccatcaccttccagctgcccatgtgcacaaataaatatattgatcacatagcctgtgaaacccttgctgtcgtcagattggcttgtgtggatacctcatctaacaagattgcaatcatggtttctagcattgtcttgcttatgacacctttcttcctagttcttctgtcctacatccagatcatctccaccatcttaaagatacagtccacagagggaaggtggaaagcctttcacacttgtgcctctcaccttactatggttgtcctgtgctatggcatggccattttcacatacatccaaccccactccagcccctctgtccttcaggagaagttgatgtctctgttctatgctatcttgacacccatgctgaaccccatgatttacagcctaaggaataaagaggttaagggggcatggcagaaattattagggaaattctctgggtttgcatcaaaattggccacttga

SEQ ID NO: 144 - DNA, 915 bp, Mus musculus
  MOR227-1
atggccagggaaaataacgtgactgaattgatcatcaccggccttttccaggatccaaatgtgcagaaggtgtgctttgtgctgttccttcctgtgtacctggccacagtgttgggcaatggcctcattgttgcaatggtcattgtcagtaagagtctgcattctcccatgtacatcttcctcagctccttgtccctggtggagatctgttactcttctactgttgtccctaagttcatcactgacttacttgctaaggttaaaaccatctcgctgaagggctgtctggctcagatattcttcttccatttcttgggagtggctgagatatttttgcttgtggtgatggcctatgaccgctatgtggccatctgcaaacctcttcattacatgaatatcatgagtcgtcaagtgtgtcacgtgctggtggctgtttcttggctggggggctttttacattctataattcaggttcttatctctattcagttgcccttctgtggtcccaatgtgattgaccactacttctgtgacctgcagccattattcaagctggcttgcactgatacatttgtggagagtgtcattgtaatggccaatagtggtttaattgctctgtgttccttccttgtcttggtgtcctcctatgtcatcatccttgtcaatttgaggaagcattctgcagaggggagacgcaaggccctctccacctgtgcctctcacatcacagtggtcgtcttgttctttggacccgccatcttcctctacatgagaccttcctctactttcactgaagacaagcttgtggctgtgttctacacggtcatcacccctatgctgaatcccatcatctacacactcagaaatgcagaggtgaaaaatgctgtgaggaagttgtggggaaaaagaatatag

SEQ ID NO: 145 - DNA, 918 bp, Mus musculus
  MOR227-2
atggccaacaaaaataatgtaaccgagttaattttcactggccttttccaggatccagaggttcagaaggtgtgctttgtgctgttccttcctgtgtacctggccacattgctgggcaacagtcttattcttgtggcagtcagcatcagtaagactttacattctcccatgtacttcttcctcagttccttgtccctggtggagatctgttactcctctacaattgtccctaagttcatcactgacttacttgctaaggttaaaaccatctctctgaagggctgtctgactcagatattcttttcccatttctttggtgttgttgaagtcattttgctagtggtgatggcctatgaccgctatgtggccatctgcaaacctcttcattacatgaacatcatgagtcgtcaagtgtgtcacatgctggtggctggctcctggctggggggcttcattcactccataatccagatcatcatcactattccattgcccttctgtggtcccaatgtgattgaccactacttctgtgacctgcaacaattatttaagcttgcctgcactgacacctttatggaggggtttattgtgatggccaacagtggtttaatctctatagtctctctcttcatcttggtgtcctcctatgctgtcatcctaatcagcttgaggaagcgttctgcagaggggaggcgcaaggctctctccacctgtgcctctcacatcacagtggtcatcctgttctttgtgcctggtgcatttatttatatgagaccttcctccaccttcactgaagataagcttgtgtctgtgttctacactgtcattacccctatgctgaaccccattgtctatactctaaggaatacagaaatgaaaaatgctatacgaatgtcctggaagcaaaaggacagctga

SEQ ID NO: 146 - DNA, 921 bp, Mus musculus
  MOR231-1
atggaaccaaggaacaatgtaacctactttgtcctcttgggcctctcagagaatccaaaggtgcagaaaggacttttcgttctttttttgctctcctatgttttgactatggtgggaaatctgctcattgttatgactgtaactaccagtaacagcctgggctcaccaatgtatttctttcttgctagcttgtcatttgtggatatcatttattcttcagccatttctcccaagttgatttcagatttgttctttggtcaaaatacaatatcctttaaattttgtatgactcagctattcacagaacacttttttggtggatcagaggtttttcttctgctggtgatggcctatgatcgttatgtggccatctgtaagcccttgcactattcaactatcatgaagcaatgggtttgtgttgtgctgttgatattatcttggatcggaggatttttgcactcagtaattcagctcagtactatttatggacttccattctgtggtcctaatatcattgatcattttatgtgtgacatgtaccccttactgaaacttgtttgtattgacacctatgtcattggcctcttagtgatggccaatggagggctgatctgcacggttgtgtttatactcctgctcatctcttatggtgtcatcctgtactctctaaagaaccttaatcaggaagggaggtggaaagctctctctacctgtggctcccacatcactgtagttgtttcattctttgttccctgtattttcatgtatgcacgacctgctaagactttccccattgacaaaatgttgagtgtgttttatacagtcattacccccatgatgaaccccttgatatatactctgagaaactcagagatgacaaatgctatgaagaagctgtggagaaggaaaattatttcatga

SEQ ID NO: 147 - DNA, 930 bp, Mus musculus
  MOR232-1
atggagaaccaaaacaatgtgacagaatttatccttctgggactcacagagaacccaaagatgcaaaaaattgtattcattatgttttttcttatctacatcatttctataacaggaaatgtgctcattgtggtcaccataacttctacgtcattattagagtcccccatgtactttttcctggcttatctatcctttattgatgcttgctattcctctgttagcacccctaaactgatagcagattcactctgtgaaaagaagaccatcccatttaatggatgcatgactcagatctttggggagcatttgtttggaggtgctgaaatcatcctgctgacagtaatggcctatgaccgctatgtggccatctgcaaaccccttcattatgcaacgatcatgagtcgaagactatgtagcctgctagtgggagtgtcatggctaggaggttttcttcatgccaccatacagatcctgttcattttccaattacccttctgtggccctaacatcatagatcattttatgtgtgatcttaatcctttgctcaaccttgtatgcaccgatactcacactcttggaatctttgttgcagccaacagtggttttatttgtctgctaaacttccttcttctattggtctcctatgttgccatcctgcgctccctaaagaaccacagtgcagagggaaggcgcaaagccctctctacctgtatttcacacataacagtggttgtcttattctttgtgccttgcatatttgtatacatgagacctgtagctaccttacccattgataaagcagttgctatgttctatactatgataactcccatgttgaaccccttaatctataccttaagaaatgctcagatgaaagatgccattaagaaattgggtagcactaaaattctttcaagtaataaatga

SEQ ID NO: 148 - DNA, 933 bp, Mus musculus
  MOR232-2
atgaagcaaataaacaatgtgacagaattcatcctgcttgggctgacacagaacccagatgtgcagaaactcttgcttgtcatatttgcactcatctactcccttaccctcattggcaacctgctcattattgtaacagtcatctctagcccgacactgggatcccccatgtacttttttctgtccttcttatccttcgtagatggctgctgctcttccaccatggcccccaaaatgatatttgacttacttgctgaaaggaaaacaatctccttcaatggctgcatgactcagatctttgcagaacatttctttggtggagttgagatcatcctgctcacagcgatggcctatgaccgctatgtggccatctgtaagccactacactacatgatcacaatgaacaggagagtatgtggcttcctggtttccacggcctgggctgggggatttcttcatgctttgattcaaattctttttatggtctggttgcctttctgtggcccaaatatcattgaccattttatctgtgaccttttcccgctcttaaaactttcctgcactgacaaccacatctttggactctttgttgctgccaacagcgggctaatgtgtatgctaattttttctattcttctcacctcttatgtactcatcttttgctctctaaagactcatagcactgaagaacagctgaaggctctctccacctgtgcctcccatattacagtggtcctcttattctttgtaccctgcatattcgtttaccttaggcccatggtcatcttcccctttgacaaagctgtggctgtgttctatactgtgataacacccatgctaaaccctttaatttacaccctcaggaacacagaagtgaaaaatgccatgagaaaactctggaaccaaagaaaacctgggaaaagatttacatga

SEQ ID NO: 149 - DNA, 927 bp, Mus musculus
  MOR227-3
atggccaacaaaaataatataaccgagttaattttcactggccttttccaggatccagaggttcagaaggtgtgctttgtgctgttccttcctgtgtacctggccacattgctgggcaacagtcttattgttgtggcagtcagcatcagtaagactttacattctcccatgtacttcttcctcagttccttgtccctggtggagatctgttactcctctacaattgtccctaagttcatcactgacttacttgttaaggttaaaaccatctccctgaagggctgtctggctcagatattcttctcccatttcttgggggttgctgagattctcctgcttgtggtgatggcttatgaccgctatgtggccatctgcaaacctcttcattacatgaacatcatgagtcgtcaagtgtgtcacatgttggtgggtggctcctggctggggggcctcattcactccataatccagatcatcatcactattccattgcccttctgtggtcccaatgtgattgaccactacttctgtgacctgcagccattatttaagcttgcctgcactgacacctttatggaaggtgttgttgtgatggccaacagtggtttaatctctataatctctcttttcatcttggtgtcctcttatgctatcattctaatcagcttgaggaagcattctgcagagggaagacgcaaggccctctccacatgtgcctctcacatcacagtggtcatcctgttctttggacctgccaccttcctttatctgcgaccatcctccagcttcactgaagataagcttgtggctgtgttctacacagtcatcacccccatgctgaaccctatcatctatactctcagaaatgcagaggtgaaaaatgccatgaagaaattgtggggcaaaaggaacccagagacagagtga

SEQ ID NO: 150 - DNA, 930 bp, Mus musculus
  MOR229-1
atggcagctgcaagcaatgttacagaaataattttcttgggcttatcccagtatcagcatgtacagaaggtcatctttgtgatgtttctcctgatgtacacagccattgtgctgggcaatggccttattgtggtgactatcgtggccagcaaagggctttcttcccccatgtatttcttcctcggctacttgtcattcgtagaagtctgctactgttctgtcacagcccccaaactcatctttgactctttgctccagaggaaagccatttcccttcagggttgcatcacacaaatatttttccttcatttctttggtggcactgaaatcttccttctgacagtgatggcctatgaccgctatgtcgccatctgcaagcctttgcactatgtcactatcatgaaccgaagagtgtgtggcctcctggtaggggcagcatggagtgggggtttgctgcattctgctggacaaactttccttattttccagctaccattttgtggtcccaacatcattaatcactacttctgtgacgtccacccggtgttgaagctggcttgctcagacaccttcctcattagcctgttagtcatcatcaatggtggctccatctcagtgatcagctttgcagtgctcttggcttcttatgtggtcattctgaattctctgaggagccacacagcagaaggacgacataaggcactctctacttgtgcctctcacctggctgtggtgggtctgttttttataccctgctcttttgtctacatgagaccctgtatcaccttccctgtagacaaggttgtggctgtgttttatacagttgtcacacctctcttgaaccccattatttactctttcagaaacactgaggtgaaaaatgccatgaagagactcgtggggaggaaggtgacttgggaagagaaatag

SEQ ID NO: 151 - DNA, 936 bp, Mus musculus
  MOR232-3
atggaaattaggagcaatgtgacagagtttgttctcttggggctcaccagaaacccaagcatgcagaaaatcgtgtttgctgtatttgtcgtcatctacatcatctccatggtaggcaatgtgctcattgtggtcactatcactgccagtccatcgctgggctcccctatgtactttttcttagcgtatctctctttcattgatgcctgttattcctctgtcaacactcctaaattgatcatagactcactccatgaaaaaaagacaatactattcaatggatgcatgacccaggtctttggggagcatttctttggaggtgctgagggcatcctgcttactgtgatggcctatgaccgctatgtggcaatctgcaagcccttacactatacaaccatcatgagcagaagggtatgtggcctgctggtaggagtggtatgggtcggaggttttcttcatgcaaccatacagattctgtttatttttaaattacctttctgtggcccaaatgtcatagatcactttatgtgtgatctgaaccctttgcttaaccttgcatgcactgatacccacattctggggctctttgttgctgccaacagtggttttatttgtctgttgaacttcctccttctgttggtctcctatgtggtcattctacgttcattaagaaaccacagtgcagaggggaggcgcaaagccctctccacttgtgtctcccacataacagttgttgtcttgtttttcgtaccctgcatttttgtgtacatgagaccttcagccactttgtctattgataaagcagttgctgtcttctacactatgataactcccttgttaaatcctttaatctacaccttgagaaatgctcagatgaaagatgccattaagaaattgtgtagatggaaagatgatgttatttccatcaacaaataa

SEQ ID NO: 152 - DNA, 933 bp, Mus musculus
  MOR232-4
atgaatgacactgaacacatggagaataaaaggaacgtgactgagttcatcttgataggtcttacacagaacccccaaatgcagaaagtagtgttcgtgacatttttgcttctgtacatgataacaatttcaggcaacctgctcattgtggtcactatcatcaacagccaggctctgaattcccccatgtatttcttcctgagccacctctccttgatagatacaatttacacttcttcttcagctccaaagctgattgcggactcccttcaagagaacaaagtcatctcctttaatggatgcatggctcaagtctatgcagagcacatttttggtgctactgagatcatcctgttgacagtgatggcttatgaccgctatgtggccatctgcaaacctctgcactatatgaccatcatgagccacaagctatgcattctcctggtgggggtagcctggactggaggatttctccatgcaactattcagatcctttttacagtgtggctgcccttctgtggccccaacatcatagaccattttatgtgtgacttgtacccattgttggaacttgtttgcatggacacacacactcttggtctctttgttgctgccaacagtgggttcatctgcctatttaatttcctgctcttgatgggatcctatgtgatcatcttgcgctctttaaagaactatagcttagaaggcaggcgcaaagctctctccacctgtgtgtcacacatcacagtagttgttttatcctttattccttgcatatttgtatatctacgtccagtgaccactctgccaattgataaagctgttgcagtcttttatactttggtggcccctctactgaatcctttaatctacaccctcagaaattctgaggtaaaaaatgcaataaagaagctctggaggaaaaaaatataa

SEQ ID NO: 153 - DNA, 906 bp, Mus musculus
  MOR232-5
atgaataatatcaccgaattcatccttgtgggcttgactcagaacatggagcttcagatattttcatttgtcgtatttttcattgtctatctgctcaccttggctggcaacctgcttatcatggtcaccatcagcagcagcaaggccctgggatccccgatgtatttcttcctctctttcctgtcgctgatagatggctgctgctcctcgtccatgactcctaagatgctggctgactctctctctgtgcggaaaaccatttctttcagtggctgcatgactcaagtctttgccgagcattttttcggggctgctgagattattcttctcacagtgatggcctacgaccgctatgtggccatctgtaaaccgctgcgctacacgatcattatgaacagatttgtgtgtggcctcttggtgggggtggcctgggctgggggttttattcatgcgaccattcagatcctcttcacagtctggctgcctttctgtggtcccaatgtcatagaccactttatgtgtgacctgacccctttgctgaaacttgtttgtatggacacacacaacctgggtctctttgttgctgccaacagtggctttatctgcctgttaaactttctacttctgatgatctcttatatagtcatcctcgatgctctaaaatctcacagcaaggagggaaggtgcaaagccctctccacctgtgtctctcacattactgtggtcatcttattctttgtgccttgcatatttgtgtatcttcgcccagtaattaccttctctattgataaagcggtggctgtattttataccatgattactcctatgttaaaccccttaatctacactctcagaaatactgaggttaaaaatgctatgaagaaactctgtatcaaagttgattaa

SEQ ID NO: 154 - DNA, 924 bp, Mus musculus
  MOR227-4
atggctagtgtaaatgtgactgagttgatcatcaccggccttttccaggatccagatgtgcagaaggtgtgctttgtgctgttccttcctgtgtacctggccacagtgttgggcaatggcctcattgttgtgacaattagtgtcagtaagagtctgaattctcccatgtacatcttcctcagctcgttgtccatagtagagatttgctactcctctacggttgtccctaagttcatcactgacttacttgctaaggttaaaaccatttctctgaagggctgtctgactcagatattcttcttccatttcttgggggttgctgagattcttctgcttgtggtgatggcctatgatcgctacgtggccatctgcaaacctcttcattacatgaacatcatgagtcgtcaagtgtgtcacatgctggtgggtggctcctggctggggggcctcattcactccataatccagatcgtcatcactattccattgcccttctgtggtcccaatgtaattgaccactacttctgtgacctgcagccattatttaagcttgcctgcactgatacctttatggaaggtgttgttgtgatggccaacagtgggttaatctctataatctctctcttcatcttggtgtcctcttatgctatcattctaatcagcttgaggaagcattctgcagaggggagacggaaggccctctctacctgtgcctcacacatcacagtggttatcctgttttttggacctgccaccttcctttatctgcgaccatcctccagcttcactgaagataagcttgtggctgtgttctacacagtcatcacccccatgctgaaccctatcatctatacactcagaaatgcagaggtgaaaaatgccatgaagaaattgtggggcaaaaggaacccagagacagagtga

SEQ ID NO: 155 - DNA, 915 bp, Mus musculus
  MOR234-1
atgagcaatgtcacagaattcatcctcctgggcctgacccaagacccagatctgcagaaactcttatttattgtgtgcttaataatctatttgatcacactggcaggtaacatgctcatctcagtcaccattttcatcagcccagccctggccactcccatgtacttctttctgtcctacttgtccatcatagatggtttctactcttcttccatcacacccaaaatgatctatgacctaatctctgagaagagcaccatatccttcaatggctgcatgactcagctttttgctgagcacttttttgctgcagctgaaatcatcttgctgatttccatggcctatgatcgctatgtagccatctgcaagcccttgcactacatgaccatcatgaaccgacatgtatgtattttcttagtggtagcagctggaatcgtggggtttgttcatggaatgatacagactacatttatagcccaattacccttctgtggccccaatatcattaatcactttatatgtgatttaataccacttttggagttggcctgcactgacactcacactctggggccactgatagctgccaacagcgggtcaatgtgtttactcattttctctatgctggttgcttcctatgtggtcatccttcgctccctaaggaatcacagtgcagaagggcgtcgcaaagccctgtctacctgtgcctctcatgtcaccgttgttgtcttattctttgtaccttgttcatacttgtatgtgagaccagtgatctccttccacattgacaaaattgtgagtgtgttttacaccctagtgactcctctgttgaaccctctgatctataccctcagaaatgaggaggtcaaaagggttatgaagaagctcctggggtcaaatcatgtcaaacactag

SEQ ID NO: 156 - DNA, 945 bp, Mus musculus
  MOR231-2
atggaaaacaggaacaatgtgactgaatttatccttctgggcctcactcagaatccagaaggccaaaaggttctgtttgtcacattcttgctcatctacattgtgacagtaatgggcaatctgctcatcatggtgaccatcatggctagccagtccctcggctctcctatgtacttctttctggcttatttgtcatttatagatactgtctattctacttccattgctcccaaaatgattattgacttgctctatgaaacaaagaccatctccttccgggcttgtatgactcaagtttttatagatcatttatttgctggagctgaggttattcttctggtggtgatggcctatgaccgttatgtggccatctgtaaacctcttcattatttgaccatcatgaatcgacgagtgtgtgttctcatgctgctgggggcctggattggtggctttcttcactcattaattcaatttatcttcatttatcagcttcctttctgtggcccaaatatcattgatagctttgtatgtgatatgtatcctctgctaaaactggcttgcaccaatacctaccttatagggctttgtatgattgctaatggaggagcaatttgtaccgtcacctttttaattctcctagtttcttatggagtcattttacactcccttaaggcacatagtctggaagggaagcgcaaagctttgtacacatgtgcatcccacattactgtggttgttttattctttgttccatgcatctttctatatgcaaggcctacatccacatttccaattgataagtctgtgactgttgtcttaactttcataactccgatgctgaaccccttaatctacaccttgaggaatgcagaaatgaaaaatgctatgaagagactttggagcaaaaaatctagctccatcgtaagtgggctatatcactcttga

SEQ ID NO: 157 - DNA, 918 bp, Mus musculus
  MOR238-1
atgaatgtgactgaattcatcctcatgggactgactcagaaccctcagctgcagagaattcttcttctgatgcttcttatcatctacattgtcactgtcacaggaaacctgctcattgtcgggaccatagtctgtagccagactttgaactccccaatgtactttttcttggcctttttatctctgatagatgcatgctattcctcttctatcattcctaagatgctagcagatttgatgtcagagagaaaaaccatctcattccatggctgcatgatacaactttttgttgaacatttcttaggagcttcagagattgttcttcttgtggtcatggcctatgaccgctatgtggccatctgtagacctctgcactatgtgacaaggatgaaccaccacaattgctgtgtcctagtcggggtatgttggataatgggttttctccactcttttggacagatactcgttactctctggattcctttctgtggccccaatgtcatggaccatttctgctgtgacattttcccgttactacagttggcctgtgcagacactttccttcttggtcttctcattgctgcaaatggtggtgtaatccctgtgatcaccttcacgatgctattgatgtcctatgcggtcattctcttttccttgaggacacatagcactgcagggaggaaaaaggccctctctacctgtagctcccacatcactgttgttgtcttgttctttgtgccatgcatttatacatatatgcggccagtaacaacttttcatacagataaagccatagcagtgttttacactcttgtcactcccatgttaaatccaattatctacactgtaaggaatgcagaggttaaaaatgccattagaatgatactaaaaaagaattcaatcttagataacaaatga

SEQ ID NO: 158 - DNA, 972 bp, Mus musculus
  MOR233-1
atgaacagattttactttaacatttccttgaaaacaatgcaaaatcaaagctttgtcactgagttcattctccttggactttcacagaacccaaatgttgagaacatactgtgtgttgtatttttgtttatttaccttgcaactattgggggcaacattatgattgtggtgactatcatctacagccctgcactgctgagctctcccatgtacttcttcttgatattcctgtccttactggatgcttgcacttcttccactgtcacccctaagatgatggtagacctcttctatgaaaggaagaccatctcctttgaatgttgcatgacacaactgtttgctattcactttttcactggaatagaggtgattattttgtcagccatggcctatgaccgttatgtggccatttgcaagccccttcactactcctccattatgaccaggagactctgtggcattttggtgatggtatcttggacaggaggattcttacattctctcatacaaattatcttcactttgcagctgcccttctgtggacccaatgtcattgatcattatctgtgtgacttgttcccattactgaagcttgcctgcactgacacacacatatttgtcatattggtgttttctaacagtgggtctatcagcatcataatcttctctattttgcttgtctcctatggtgtcatcttgttttctctgagagctcacagctctgaagggcggcgtaaagctctctccacatgtggatcccacattacagttgtgcttttgttctttgtcccatgctttttaatatatgcacgacctccttctgctttctcttctgaaaaaaatgcctttgtatttgccaccatcataacaccacttctgaatcctatggtttacactttcaggaataaggaaatgaagaatgccattagaaaaatgtggaagaaactaatagtggtttctcatgacttttaa

SEQ ID NO: 159 - DNA, 918 bp, Mus musculus
  MOR231-3
atggaacagagaaacaatgtgactgagtttgtcctcttgggcctgactcagagtcctgaaggccagaaaatattatttgttgtgttcttggtcatctatgttgtgacaatggcaggcaatctactcattgttgtgactgttgtggtcagcccaagtttagatgcccccatgtacttctttcttggctacttatcatttatggatgctgtgtattcaaccacagttacaccaaatatgattatagacttactctatgagaagaaaactatttccttcaaagcttgcatgagccagcttttcataggacacttgtttggtggagctgagatcttactattagttgtcatggcctatgaccggtatgtagccatctgcaaacccttacattatctgaccatcatgaaccaacgtgtgtgtgttttgctcttgttattggcctggtttgggggtttcttgcatgctgtagtccaacttctatttgtatataaccttcctttctgtggtcctaatatcattgatcacttcatctgtgacatgtatcccttattaaaattggcctgcacagacacctatgttattggcctcacagttgttgccaatgatggagcaatatgtgtggtcatctttatgctgttggtcatttcttacggggtaattcttcactccctgaagaatctcagtcaggaaggaaggcgcaaagccttatccacctgtggctcccatatcactgtggtagtcctcttctttgttccctgtatttttatgtatgtgagacctccatctactttacccattgataagtcattgactgtattttacactgttgtcacccccatgttaaatcccctcatatatactctgagaaatgcagagatgaaaaatgccatgaggaaactatgggcaagtaaagggaaatga

SEQ ID NO: 160 - DNA, 918 bp, Mus musculus
  MOR231-4
atgggacagagctacaatgtcacagaattcatttttgtggaccttactcaagatcctgctgggaaaaaagccttatttgtcttgttttcacttacctacattgtgacaatgctgggtaacctgctcattgcagtgacggtgattgccagcccttccttaaactccccaatgtacttctttcttgcctgtctgtcagtcctggatgctttttattgcaatactatctcacccaatttgattataggtttattaaaagataaaaataatatctccttcagagcttgcatgctccagctctttgtagagcacttatttggaggtgttgaggtcttccttctggtattcatggcctatgatcgctatgtggccatctgtaagccactgcactatttgaccatcatgaatcagcgggtgtgcattcttctgttgctggtagctggagttggaggcatcttacactcattgattcaagttctcactgtgtataaacttcctttttgtggtcccaatgtcattgatcacttcatgtgtgatatgaatccattactgggacttgcatgcactgacacctacttccttggcatcactgtcattgccaatggtggagtaatctgtgtgggaattttcacctttctcttagtctcctatggaatcattctaaactctcttaagacccacagccaggaaggaaggcgcaaagctctgtccacctgtagttcccacatcatggtggttgtctgcttttttgctccctgtatttttatatatgctaggcctgtttccaatttttccattgataaatatattgctgtgttttatacggttgttagtcctatgcttaatccattgatatataccttgagaaattcagagatgaaaaattctataaaaaagctctggtgtaaaacactagcatag

SEQ ID NO: 161 - DNA, 921 bp, Mus musculus
  MOR231-5
atgggacagaaccacaatgtcacagaattcatttttgtgggtcttagtcaagatcctgctgggcaaaaagtattatttgtcttgttttcactgacttacattgtgacaatgttcggaaacctgctcattgcacttacagtgattgccagcccctccttaaactccccaatgtacttcttccttgcctgtctgtcagtcctggatgctctttattgcaatacaatctcaccaaatttgattatagacttgttatataataaaaagaatatctccttcagagcttgcatgctccagctgtttgtagagcacttatttggaggtgttgaggtcttccttctggtattcatggcctatgatcgctatgtggccatctgtaagccactgcactatttgaccatcatgaaccagagggtgtgcattcttctattgctgatagctggagttggaggcatcttacactcactgattcaagttctgactgtgtataaacttcctttttgtggtcccaatgtcattgatcacttcatgtgtgacatgaatcaattactcgggcttgcatgcactgacacctacttccttggcatcactgtcatggccaatggtggagtaatctgtgtgggaattttcacctttctcttagtctcctatggaatcattctaaactctcttaagacccacagtcgggaaggaagacataaagctctgtttacctgcagttctcacatcatggttgttgtctgcttttttgctccctgtagttttatatatgctagacctgtctccaactttccagtggataaatatattgctgtgttttatacagttgttagtcccatgctgaatccattgatatataccttgagaaattcagagatgaaaaactctattaaaaagctctggtgtaaaactctaacaacataa

SEQ ID NO: 162 - DNA, 933 bp, Mus musculus
  MOR233-2
atgttaaaccacagtagtgtcactgagttcattcttcttggactttcacagaactcaaaagttgagaaagtactgtttgttatatttttgttgatctaccttgcaactattgggggcaacatgattattgtagtaaccatcatctatagccctgcactgctgggctccccaatgtacttcttcttaatattcctgtcctttctggatgcttgcacttcttccactgtcacccccaagatgattgtagacttcttctatgaaaagaagaccatctcctttgaatgctgcatgacacaactgtttgctgtgcacttcttcactgggatggaggtgattgtcctttcagccatggcctatgaccgctatgtggccatttgcaagcctcttcactactcctccatcatgaccaggagactctgtggcattttggtgatgttgtcttgggcaggaggcttcttgcattctatcatacaaatcatcttcactttgcagctgcccttctgtggacccaatgtcattgatcattacatgtgtgacttgttcccattactgaagcttgcctgcactgacacacacatatttgtcattttagtgtttgccaacagtgggtctatctgcattataatcttctctattttgcttgtctcctatagtgtcatcttgttctctctgagagcccacagttctgaagggcggcgtaaagctctctccacctgtggatcccacattacagttgtgcttttgttttttgtgtcatgcatattaatatatgctcgacctgctgccttctcttctgaaaaaaatgcacttgtatttgccacaatcataacaccacttctgaatcctatggtatatactttcaggaatagggaaatgaagaatgctattaggaaactgtggaagagatggaaagtggtttctggtgacatttaa

SEQ ID NO: 163 - DNA, 945 bp, Mus musculus
  MOR231-6
atgggagagactaacaatgtcacagaatttgtccttctgggcctcactcaggatcctactgggcaaaaagcattgtttgtcatgtttttgctcgtgtacattgtgactattgtgggcaacctgctcatcgtggggacagtgattgccagcccctccttgaattccccaatgtacttcttccttgcctttctgtcactcatggatgctgtttattctactgccatcttgcccaagttgcttaaagacttagtttgtgataaaaagaccatctccttcacagcttgtctggttcagctctttgtagagcacttatttggtggtgctgaggtcttccttctggtggtgatggcctatgatcgctatgtggccatctgtaagccactgcactatttaactgtcatgaatcaacaggtttgtatctcacttttggtggtagcctgggttgggggatttgcacatgctctggttcaagttctctctgtatataaacttcctttctgtggacctaatgtcattgatcactttggctgtgacatgtatcctttattggcacttgtgtgcactgacacctactttattggcctcacggtagttgccaataatggagccatgtgtatggtagtctttgtccttcttctattttcctatggaattatcttaagctcccttaagactcacagtcaggaagggaggcgcaaagccctgtccacctgcagctcccacatcatggttgttgttcttttctttgttccctgtatattcatgtatgttagacctgtctccaacttccctattgataaatctatttctgttttttatacagctattactcccatgttgaatcctttgatatatacattgagaaattcagagattaaaaattccatgggaaagctctggagtaaaatgataagtatagatagagtaagaatttttgcatactga

SEQ ID NO: 164 - DNA, 945 bp, Mus musculus
  MOR231-7
atgggacagaataacaatgttacagagtttatcctcctgggtctcactcaggatcctgctgggcaaaaagtattgttcatcatgtttttactcatctacattgtgacaatagtgggcaacctgctcattgtggggacagtgattgccagcccctccttgggctccccaatgtactttttccttgcctttctttcactcatggatgctgtttattctactgccatcttgcccaagttgcttacagatttactttgtgataagaagaccatctccttcacagcttgtctggttcagctttttgtggagcacttattcggtggttctgaggtcttcattttggtggtgatggcctatgatcgctatgtggccatctgtaagcctctgcactatttgaccataatgaatcggcaggtttgcattctcttgttggtggtgtcctgggctggaggatttgcacatgctctgcttcaagttatctctgtgtatttacttcctttttgtggacccaatgtcattgatcattttgcttgtgacatgtacccattgctaggacttgcatgtactgacacctatttccttggactcactgtagttggcaataatggagcaatgtctatagtggtctttatcctcctccttgtctcctatggaatcattctaaactctcttaagactcacagtcaggaagggaggcgcaaagccctgtccacctgcagctcccacatcatggtggttgttctcttttttgttccctgtattttcatgtatgttagacctgtctccaactttccaattgataaatatattactgtattttatacagtttttactcccatgttgaaccctttaatatataccttgagaaacatggagattaaaaattgtatggcaaagctgtggtgtaaaatgttcactaaagacataaaaagagattctcatcactga

SEQ ID NO: 165 - DNA, 936 bp, Mus musculus
  MOR253-1
atgatgttcagtcccaaccagacagaagtgacagagtttatactagaagggttttcagaacatgctactctaagacttctcctgacaggctgcttcctgtccctctacacaatcgctctaatgggcaacattgttatcattgctttggtcacctccagcactgggctccacagtcccatgtactttttcctgtgcaacctggccaccatggacattgtgtgcacctcctctgtgattcctaaggccctgattggcctagtgtctgaagaaaacaccatctccttcaaaggatgcatggctcagctcttctttcttctgtggtccttgtcttcggagctgctgctgctcacggtcatggcctatgaccgctatgtggccatctgctttcccctgcactacagctctagaatgagcccacagctctgtggggccctggccgtgggtgtatggtccatctgtgctgtgaatgcatctgtgcacactggcctgatgacacggctgtcattctgtggccccaaggtcatcacccacttcttctgtgagattcccccactcctcctgctttcctgtagtcccacatacattaatagcgttatgacacttgtggcagatgccttttatgggtgcatcaactttgtgctaaccttgttatcctatggctgcatcattgccagtgttctgcgcatgcgttctgctgagggcaagaggaaggccttttctacctgttcatcccacctcatcgtggtctcagtgtactactcatctgtgttctgtgcctatgtcagtcctgcctccagctacagcccagaaagaagcaaagttacctccgtgctgtactcgatcctcagcccaaccctgaaccccctcatctatacactaaggaacaaggatgtcaaactcgccctgggaagactcttgccctttttccccaagtag

SEQ ID NO: 166 - DNA, 936 bp, Mus musculus
  MOR253-2
atgatgttgagactcaaccagacagaagtaacagagtttgtgctggaagggttctcagagcaccctgatctaagattgttcctgataggctgcttcttgaccctctacataatggctctgatgggcaacattttgatcatcgctttggttacctccagcactgggctccacaatcccatgtactttttcctgtgcaacctggctaccacggatattttgtgcacctcctctgtgattcctaaggccttggttggcctagtgtctgaggaaaacactatctccttcaaggaatgtatgtctcagctcttcttccttgcatggtcagcatcttctgagctgctgctgctcacggtcatggcctatgaccgctatgtggccatctgctgtcccctgcactacagctctaggatgagcccacagatgtgtggggccctggccatgggtgtatggtccatcagtgctgtgaatgcatctgtgcacactggcctgatgacacggctgtcattctgtggacccaaggtcatcacccacttcttctgtgagattcccccactcctcctgctctcctgtagtcctacatatgtaaataccattatgactcttttgggagattccttttttggaggcgtcaattttgtgcttaccttgctatcctatggctgcatcattgccagcatcctgcgcatgcgttctgctgagggcaagaggaaggccttttctacctgctcatcccacctcattgtggtctctgtgtactactcatctgtgttctgtgcctatgtcagccctgcttccagctacagtccagaaagaagcaaagttacctcagtgttatactcgatcgtcagcccaaccctcaaccccctcatctatacactgaggaacaaggatgtcaagcttgccttgggcagaatattggcctctttctcacattaa

SEQ ID NO: 167 - DNA, 939 bp, Mus musculus
  MOR253-3
atgatgatgctaagactgaaccagacagaagtgacagagtttgtgctggaagggttctcagagcaccctgatctaagattgttcctcataggctgcttcctgtccctctacatgatggctctaatgggcaacattgtgatcatcgctttggtcacctccagcactgggctccatagtcccatgtactttttcctgtgcaacctggccaccatggacattgtgtgcacctcctctgtgattcccaaggccctggttggcctagtgtctggggaaaacaccatctccttcaaaggatgcatggcccagctctttttccttgtgtggtcagcatcttctgagctgctgctgctcacggtcatggcctatgaccgctatgtggccatctgttttcccctacactacagctctaggatgagcccacagctctgtggggctctggccgtgggtgtgtggtccatctgtgctctgaatgcatctgtacacactggtctgatgacacggctgtcattctgtggacccaagatcatcacccacttcttctgtgagatacccccactcctcctgctttcctgtagtcccacatacattaatagtgttatgacacttgtggcagatgccttttatggaggcatcaacttcgtgctaacactgttgtcctatggctacatcattggcagcatcctgcgcatgcgttctgctgagggcaagaggaaggccttttctacctgctcatcccacctcattgtggtctctgtgtactactcatctgtgttctgtgcctatgtcagccctgcttctagctacagcccagaaagaagcaaagtttcctcagtgctgtactcagtcctcagcccaaccctcaaccccctcatctatacactgaggaacaaggatgtcaagcttgccctgggcagaatcttaccctctttctcacattaa

SEQ ID NO: 168 - DNA, 960 bp, Mus musculus
  MOR253-4
atggtggacctggtgctctccatgatgatgctgaatctcaaccagacagaagtgacagagtttgtgctggaagggttctcagagcaccctggtctaagattgttcctgacaggctgcttcttgtccctctacatgatggctctaatgggcaacattttgatcatcgctttggtcaccttcagcacagggcttcacaatcccatgtactttttcctgtgcaacctggccaccatggacattatctgtacctcttctgtgattcctaaggccttggttggcctagtgtctgaggaaaacaccatctccttcaagggatgtatgtcccagctcttcttccttacatggtcagcatcctctgagctgctgctgctcacggtcatggcctatgaccgctatgtggctatctgctttcccctacactacagctctaggatgagcccacagctgtgtggggccctagccatggttgtatggttcatcggtcttgtgaatgcatgtgtccacactggtctaatgacacgcttgtcattctgtggtcccaaggttatcacccacttcttctgtgagattcccccactcctcctgctctcctgtagtcctacatatgtgaatagcattctgactcttgtggcagatgccttttttgtaggcatcaacttcatgctaaccttgttgtcttatggctgcatcattgccagcatcctgcgcatgcgttctgctgagggcaagaggaaggccttttctacctgctcatcccacctcattgtggtctctgtgtactactcatctatgttctgtgcctatatcagtcctgcttctagctacagcccagaaagaagcaaagttacctcagttctgtactcaatcctcagcccaaccctcaaccccctcatctatacactgaggaacaaggatgtcaagcttgccttgggcagaatattggcttctttctcacattaa

SEQ ID NO: 169 - DNA, 939 bp, Mus musculus
  MOR253-5
atgatgttgttgagtctcaaccagacaggagtgacagagtttgtgctggaagggttctcagagcatcctggtctaagactgttcctgacaggctgcttcttgaccctctacatgatggctctaatgggcaacattgtgatcattgctttggtcacctccagcactggactccacaatcccatgtactttttcctgtgcaacctggctaccacggatattgtgtgcacctcctctgtgattcctaaggccctgattggcctagtatctgaggaaaacatcatcaccttcaagggatgtatggcccagctcttcttccttgcatgggcaacatccgcagagctgttgctgctcacggtcatggcctatgaccgctatgtggctatctgctttcccctacactacagctctaggatgagcccacagctctgtggagcactggccgtgggtgtatggtccatcagtgctgtgaatgcatctgtgcacactggcctgatgacacggctgtcattctgtggacccaaggtcatcacccacttcttctgtgagatacccccactcctcctgctctcctgtagttccacatacattaatagtgttatgacacttgtggcagatgtctttctgggaggcatcaacttcatgttaaccctgttatcttatggcttcatcattgccagcatcctgcgcatgcgttctgctgagggcaagaggaaggccttttctacctgctcatcccacctcatcgtggtctcagtgtactactcatctgtgttctgtgcctatatcagtcctgcttccagctacagcccagaaagaagcaaatttacctcagtgctatactcggtcgtcagtccaaccctcaaccccctcatctatacactgaggaacaaggatgtcaagcttgccttgggcaggatgttggcctctttctcacattaa

SEQ ID NO: 170 - DNA, 960 bp, Mus musculus
  MOR3-1
atggtcctatccaacattactcattttagccctatgttctacctcagtggctttcctggtttggaagccattgaacactggattttcatcccctttttcttgatgtacctggtggccatttcaggcaattgtctcattctgataattattaagaccagccctcgtctgcacacacccatgtactatctactttccttgctggccctcactgacctggggctgtcagtgtctaccttgcccaccatggtgggtattttttggttcaattaccatggcatttattttggagcctgccaaatccagatgttctgcatccactctttttccttcatggagtctgcagtgctcctcgtcatgtcctttgatcgttttgtggccatctgccacccactgaggtactcctccattatcaccgttcagagggtaatgagggcaggcctatgtgtcatcctcagggggcctgtagcccttatcccaattgtgctcctcctgaaggattttccctactgtggacctcttgtcctctcccactcattttgtctacaccaggaagtgatacacctggcatgtgtagacaccaccttcaacaacctatatggactgtcactggtggtgttcaccgtgatgctagacctcgtgctcattgcgctgtcctatggattcatcctatacacggtggctggtctggcttcccaagaggagcagatccgagccttccaaacatgtacttcacatctctgtgctgtgcttgtgttctttgtgcccatgatgggactgtccctggtacaccgctttgggaaacatgctccacctgctgtgcatcttctcatggccaacatctacctctttgtaccacccatgcttaacccagtcatatatagtattaagacaaaggaaatccgaaaagcaatcatcaggttcctaggttttagaaaggtcaattctgaatcctggggataa

SEQ ID NO: 171 - DNA, 945 bp, Mus musculus
  MOR273-1
atgatggaacgtgagaactacacttttaacagcgacttcatccttttgggactgttctcctcttcaaagataagcttaacttttttctcagttatatttttcatttttattatgactataacagaaaatgccctcatgatcctcctaatccacagggattctcgactccataccccaatgtatttcctgctcagtcatctctccttcatggatatcttgcacatttccaacattgttcctaaaatgattgctgacttcctctcaggcagcagaactatttcctttgcaggctgtgccttccagatatttctctctcttaccttgctaggtggtgagtgccttctcttggcagtcatgtcctatgatcgatatgtggccatctgccacccacttcgctaccctgtgctgatgagggataacttcagtaggctcctggctgcaggctcctggctggtggggatcctcaactccatagtccacacagcttttgtactacactttcccttctgccactcaagggccattgatcactttttctgtgaagtccctgccatgttgaagttgtcatgtatagacacaacacactatgagcgaggcgtttatgtgagtggcattatttttctgctgatcccattttccatgatctctatatcttatgtgcaaattctcctcactgtattccaaatgcactcatcaggggcccggcaaaagtccttttccacctgtttattccacatggtagttgtcataatgtactacgggccattcattttcacatatatgagacctcgctcataccacactccagggcaggataagtttctggcaatattctacaccatcctgacacccacactcaaccccataatctatagctttcggaataaagatgtcctcatggctttgaaaaacatagtccaaagtaatattctgaataaagaatga

SEQ ID NO: 172 - DNA, 942 bp, Mus musculus
  MOR273-2
atgatggaatatgagaactacacttttaacgacttcatcctcttgggactgttctcttcttcaaagacaagtttaacttttttctcagttatatttttcatttttattatggctataacagaaaatgccctcatgatcctcctaatccacagggattctcgactccataccccaatgtattttctgctcagtcatctctccttcatggatatcttgcacatttccaacattgttcctaaaatgattgctgacttcctctcaggcagcagaactatttcctttgcaggctgtgccttccagatatttctctctcttaccttgctaggtggtgagtgccttctcctggcagccatgtcctatgatcgatatgtggccatctgccacccactttgctaccctgtgctgatgagggataacttcagtaggctcctggctgcaggctcctggctggtggggatcctcaactccatagtccacacagcttttgtactacactttcccttctgccactcaagggccattgatcactttttctgtgaagtccctgccatgttgaagttgtcatgtatagacacaacacactatgagcaaggagtttatgtgagtggcattatttttctgatggtcccattttccatgatctctatatcttatgtgcaaattctcctcactgtattccaaatgcactcatcaggggcccggcaaaagtccttttccacctgtttattccacatggtagttgtcataatgtactatgggccagtcattttcacatatatgagacctcgctcataccacactccagggcaggataagtttctggcaatattctacaccatcttgacacccaaactcaaccccataatctatagctttcggaataaagatgtcctcagggctttgaaaaacatagtccaaagtaatattctgaataaaaaatga

SEQ ID NO: 173 - DNA, 930 bp, Mus musculus
  MOR251-2
atggaaataaacaattacacaactgtggtggagtttgtcctgcagggactctctgaggaccctgggctccaggctctcttcttggcctttttcttgcttctttacatcctggctcttgcaggaaacaccctcatcatcatagccatcagcctcaactcaagccttcacacccccatgtacttcttccttgcaaacctggccctgttggacatcgtctgtacatccactgttcttcccaagctgctggagggtttggtgggtaagagcagccacatttcttataagggatgcatgacccaactctttttcctgacctggtttctaggggctgagctgctgctgctcactgccatggcctatgaccgctatgtggccatctgtcgcccactgcactacagcatgctgatgagctggcccatctgtgtcctgctcgccggcagtgtgtgggtcatcagtgcagccagcacatctgtgcacactggcttgatggcacgactcaatttctgtggccccaaccaaattcgtcactttttatgtgaagtcccaacactgctgcttctgtcttgcagcccaaccaccctcaacaacatcatgattgtcattgcagatgtttattttggtgtggtcaactttctgttgactatgatatcctatagcttcatcatcaccagcatcctgcgcatccgctccacagagggcaagaagcgagccttctctacctgctctgcccacctggtggtggttgtcctgtactactccaccgtcatctacacctatttgcagcctggctccggatcctccttggagaatggcaaagtagttgctttattgtacacagcagtcagccctaccctgaaccccgccatttattctctaaggaacaaggatgtcaaagttgccctcaaaaagttatttccctgtttccaatga

SEQ ID NO: 174 - DNA, 936 bp, Mus musculus
  MOR253-6
atgatgtcacgactcaaccagacagtagtgacagagtttatactgcaaggtttctcagagcaccctagtctaagactgttcctgacaggctgcttcttgtccctctatgtaatggctctaatgggcaacattttgatcattgctttggtcaccttcagcactgggctccacagtcccatgtactttttcctgtgcaacctggccaccatggatattatctgcacctcctctgtgctgcccaaggcgctggttggtctactatctgaggaaaacaccatctcctttaaagggtgcatggcccagctcttcttccttgtgtggtccttgtcttcagagctgctgctgctcacagtcatggcctatgaccgctatgtggccatctgctttcccctgcactacagctctagaatgagcccacagttgtgtggggctctggccatgggtgtatggtccatctgtgctctgaatgcatctatcaacactggtctgatgacacggctgtcattctgtggacccaaggtcatcacccacttcttctgtgagattcccccactccttctgctctcctgtagccccacatacgtaaacagcattatgactctaatagcagatgtcttctatggaggcatcaattttgtgcttaccttactatcctatggctgcatcattgccagcatcctgcgcatgcgttctgctgagggcaagaggaaggccttttctacctgctcatcccacctcatcgtggtctctgtgtactactcatctgtgttctgtgcctatgtcagccctgcatccagctatagcccagaaagaagcaaagttacctctgtgttgtactcattcctcagcccaaccctgaaccccctcatttacacattgaggaacaaagatgtcaagctcgccattggcaggctcttgccctctttctcacattaa

SEQ ID NO: 175 - DNA, 939 bp, Mus musculus
  MOR253-7
atgacgatgttgagtcccaaccagacagtagtgacagagtttgtgctggaagggttctcagagcaccctagtctaagactgttcctgatgggctgtttcctgtccctctacacagtggctctaatgggcaacattttgatcattgctttggtcacctccagcactgggctccacagtcccatgtactttttcctgtgtaacctggctaccatggatattgtgtgcacctcttctgtgattcccaaggctctgattggcctagtgtttgaggaaaataccatctccttcaaaggatgcatggcccagctcttctttcttgtgtggtccgcatcctctgagctgctgctgctcacagttatggcctatgaccgctatgtggccatctgctatcccctccactacagctctagaatgagtccacagctatgtggggtactggccatgagtgtgtggtctgtctgtgcactaaatgcatctatcaacactggtctgatgacacggctgtcattttgtggacccaaggtcatcacccacttcttctgtgagatccccccactcctcttgctctcctgtagtcctacatatgtgaatagtgttatgactcttgtggcagatgccttttatggaggcatcaacttcatgctgaccctgttgtcctatggctacatcattgccagcatcctgcgcatgcgttctgctgaaggcaggagaaaggccttttctacctgctcatcccacctcattgtggtctctgtgtactactcatctgtgttctgtgcctatgtcagccctgcttctagctatagtccagaaagaagcaaagtttcctcagtgctgtactcagtcctcagcccaaccctcaaccccctcatctatacactgaggaacaaagatgtcaagcttgccttgggcagacgtttgccatctttttaccattaa

SEQ ID NO: 176 - DNA, 915 bp, Mus musculus
  MOR251-3
atgaatgggacactggtcactgagttcctcatcctgggattctcagatatgcctcaccttcggatactacttttcctcagcttcctatgcctatacatggctgcagtctcaggaaacctgctcattatggtgacaatcagtgccagcccaaccctgcatacccctatgtacttcttcctggtcaacctggctgtggtggacatcctttgcacctccaccatcctacccaagctactggacaccatggtggggggaaggaccatctcttacgggggctgcatggcccagctcttcttcttcacatggtcactgggggtggagcttctactcttctcagctatggcctatgaccgctttgtggccatctgctgccctctgcattatagtacctggatgggccccagagtgtgtgcatttctggctggcattgtctgggctatcagcctgactaacaccagcataaactcaagcctggtgctacgtctaccattctgcagctccaatgtggttgagcacttcttctgtgagattcccccactgttgaagctctcttgtgctccaacacaattgaacgaggccatggctttcgctgcagatgtgttcctggctgtagggaacttctctgtgatcatcctctcctatggctttattgtggccagcatcctgaagatccgctcagctgagggcaagcaacgagccttctccacctgctctgcacacctcatcgtggtcaccatgtactactccactgtcatctacacctacattcgcccttcatccagctactcactgaacaaggacaaggtggtgtccatcatctacacctcagtggcacccaccttgaaccctctcatctacactctgaggaataaggatgtcaaagttgcactccggagacttttctcctgctgctga

SEQ ID NO: 177 - DNA, 939 bp, Mus musculus
  MOR103-5
atgagcaactgcagcaacaacgctttggtgacagagttcattcttctgggtttcccagagctgtgccatctacaagggctgctatttgggttcttcctcatcatctatgtggtgactgtcctagagaacctggtcattgtgggcaccatcagtgctagccggcagctacacacacccatgtacttcttcctggccaatctgtctgtgctcgagaccctctacaccacagtcacagtgcccaagctgcttgctgacctcctagcaggggcaaaaaccatctccttctcggggtgcctcacccagctgttcctctttctttctctgggctcctctgagtgtttcttactgtccaccatggcctgtgaccggtacctggccatctgccgtccactgcactacccagccatcatggattcaaagctgtgcctgcatctagctcttagtgcctggcttgggggcttcttggcctcctttgtgtccacggctctcatctctcgcctcaggttctgtggccccaatgccctcaaccacttcttctgtgatatctcacctctgttgcaactgtcctgcacagacaccactgccattgaaatgctggactttgtggcagctttagcagtacttgcaacctctctgatagtgacctcagtctcctatgtccacatcattgccactgtcctgaggattccaggaggggcaggccgcaggaaggccttctccacctgtgcctctcacttggtggtggtcttgatcttctacaccaccaccactttcatgtatgcccggcctcatgccataagctccttcgacctcaacaagctagtatctgtgatttactcggtagtgacccccctgctgaaccctataatctactgcctgcgcaaccgtgacatcagagaggcatttaccaagttcctgcagcccctcaggttcccctga

SEQ ID NO: 178 - DNA, 939 bp, Mus musculus
  MOR136-1
atgaggagagataatgagagtactgtgtctgaattcatcctcttgggactccccattcgagcagaggaccaaggcctgtactctgccctgttcctggccatgtacctgacaactgtgctggggaacctgctcatcatcctactcatcaggctggactctcacctccacacccccatgtacttcttcctcagtcacttggccttcacagacatctctttctcatcagtcgcatctccaaaaatggtcataaatatgctgacacacagtcaatccatctcatatgctgggtgtgtttcccaggtgtatttcttttcattttttgctgatcttgagagctttcttctgacctccatggcctatgacaggtatgtggccatctgccaccctctgcactattcacaaattatgagtgagaacctctgtgttcttctaatagtagtatcctggactttatctactgccaactcccttgtgcacactcttctcttggtacaactatcttactttagaaacaataccatcccccactacttctgtgacctgtctaccttgctgaagctgtccagctcagacactaccatcaatgagcttgtcatccttgttttaggtaatatggtcattaccctgccattcatatgcattctggtctcttatggccacattggtgtcaccattatgaaaattccctccatcaagggaatctgcaaagccttgtccacatgtggctctcacctctgtgtggtttccttgtactatggagccatcattggactatattttgtcccctcatctaataacactagtgacaaggatgccattgtggctatgatgtacactatggtcatacccatgctgaatccctttatttatagtttgagaaatcgggatatgaaaggagcgctgagaaatatcctcagcgggagactttggtcacagtga

SEQ ID NO: 179 - DNA, 942 bp, Mus musculus
  MOR136-2
atgaggagagataatgagagcactgtgtctgagttcatcctcctggggctccccattcagccagaggatcaaggcctgtattctgctctgttcctggccatgtacctgacaactgtgctggggaacctgctcatcatcctgctcatcaggctggactctcacctccacacccccatgtatttcttcctcagccacttggccttcacggacgtctctttctcatcagtcacagctccaaagatgctcatgaatatgctgacacacagtcagtccatctcatatgctggttgtgtttctcaggtatactttttttcaacttttactgatcttgacagttttcttctgacctccatggcctatgacaggtatgtggccatctgccaccctctgcactataccaccatcatgagtcagaacctctgtgtccttttagtagtaatgtcctgggttttatcctctgccaatgcccttgtgcacacccttctcttggctcgcctatctcattttagaaataataccattccccactacttctgtgaaccctctgccttattgagcctgtcgagctcagacaccaccatcaatgagatggtcatccttcctttaggtacactagtcattaccctgccattcatatgcatcctggtctcttatggccgaattggagtcaccattctgagaactccgtccatcaagggaatctgcaaagccttgtccacgtgtggttctcacctctctgttgtttgtctgtactatggagctattattgggctttacctagttccctcatctaataacaccaatgacaaggatgtcattgtggctgtgatatatagtctggtcacacccatggtgaatccctttatctatagtctgaggaatcgggatataaaaggagcattgagaaatatcctcaacaggagactgtgtccacagtggtaa

SEQ ID NO: 180 - DNA, 930 bp, Mus musculus
  MOR136-3
atgaggatggataatgacagcgctctgtctgagttcatcctcctggggctccccattcgagcagaagaccaagctttgtactctgtcctgatcctggccatgtacctgacaactgtgctggggaacctgctcatcatcctactcatcaggctggactctcacctccacacccccatgtacttcttcctcagccacttggccttcacagacatctctttttcatcagtcacagctcctaagatgctcgtgaatatgctgacacacagtaagtccatcccatatacagggtgtgtttcccaggtgtattttttcactgtttttgcaagcattgatagctttcttctaacatccatggcatatgacaggtatgtggccatctgccatcctctgcattataacatcatcatgaatctgaggctctgtgttcttctagtagtaatatcatgggccttatctttaaccaatgctcttgcgcacacccttctcttggctcgcctatctcactttagaaacaataccatcccccactatttctgtgacctctctaccttgctgaagctgtctagctcagacaccaccatcaatgagctggtcatctttgttttaggtaatgtggtcattaccctgccattcatatgcattctggtttcttatggctacattggtgtcaccattctgaaaactccctccatcaagggaatccacaaagccttgtccacgtgtggctctcacctctgtgtggtatccttgtactatggggccatcattggactatattttgtcccctcatctaataacactaatgacaaagatgtcattgtggctgtgatgtacactgtggtcatacccatgctgaatccctttatttatagtctgaggaatcgggatatgaaaagaacactgagaaatatcctcagcagaacaaaatga

SEQ ID NO: 181 - DNA, 939 bp, Mus musculus
  MOR136-4
atgaagagagataatgagagtactgtgtctgagttcatcctcctggggctccccattcgagcagaggaccaaggcctgtattctgccttgttcctggccatgtacctgacaactatgctggggaacctgctcatcatcctacttatcaggctggactctcacctccacacccccatgtacttcttccttagccacttggccttcacggacatctctttctcatcagtcacagccccaaagatgctcatgaatatgctgacacatagccaatctatctcatatgctgggtgtgtttcacagatgtatttttacatagtttttgctgatcttgaaaactttcttctgacatccatggcctatgacaggtatgtagccatctgccatcctctgcactatactaccatcatgagtcagagcctctgtctttttctagtagttgtgtcttgggccttatcttcaggcaatgcccttgtgcacacccttctcttggctaaactatctcactttagaaacaataccgttccgcactacttttgtgacctctctgccatgctgaaactctccagctcagacaccaccatcaatgagttgcttatccttactttaggtactatggtcactatcccaccattcatatgcattctggtctcttatgtccgtataggtgtcacaattctgagaactccctccatcaagggaatctgcaaagccttgtccacatgtggctctcacctctgtgtggtttccttgtactatggagccataattgcactgtattttgtcccctcatctaataacactaatgacaaggatgtcattgtggctttgatgtacactgtggtcacccccatgctgaatccctttatttatagtttgaggaatcgggatatgaaaggagcacttagaaatgtcctcagtaggagactgtgctcacaatga

SEQ ID NO: 182 - DNA, 921 bp, Mus musculus
  MOR136-5
atggataatgagagcactgtgtctgagttcatccttctggggctccccattcgagcagaggatcaagctgtgtactctgccttgttcctggttctgtacctgacaactgtgctggggaacctgctcatcatcctgctcatcaggctggactctcacctccacacccccatgtacttctttctcagccacttggccttcactgatatctctttctcatcagtcacagctccaaagatgctcgtgaatatgctgacacacagtcagtccatctcatatgctgggtgtatttcccaggagtattttttcacagtttttgcaggcattgatagctttcttctgacttccatggcatatgacaggtatgtggccatctgccatcctctgcactatatcaccatcatgaaccagaacctctgtgtccttctagtagttgtgtcctgggccttatcttctgcaaattgccttgtgcacacccttctcttggcttgcctatctcacttcagaaacaataccattccccattatttctgtgacctctctaccttgctgaagctgtccagctcagacaccaccatcaatcaactggtcatccttgttttaggtaatgtggtcattagcctgccatttatatgtattcttgtctcttatggccgcattggagtaaccattatgaaagctccctccatcaagggaatctgcaaagccttgtccacatgtggctctcacctctgtgtggtttccttgtactttgggtccatcattggactgtattgtgtcccctcatctaataacattaatgagaataatgccattgtgtctgtgatgtacactatggtcacacccatgttgaatccctttatttatagtttgaggaatcgggatattaaaagagcactgaaaaatatcctcagcagaaaataa

SEQ ID NO: 183 - DNA, 939 bp, Mus musculus
  MOR136-6
atgatgaagtctaatcagagcactgtgtctgagtttatcctcttagggctccccattcagccagaggatcaagctgtgtactttgccctgttcctggccatgtacctgacaactgtgctggggaacctgctcatcattcttctcattaggctggactctcacctccacacccccatgtacttcttcctcagtcacttggccttcacggacatctctttctcatctgtcacagctccaaagatgctcatgaatatgctgacacatagccaatccatctcacatgctgggtgtgtttcccaaatatattttttcttattgtttgggtgtattgacaacttccttctgacttccatggcctatgacaggtatgtggccatctgccaccctctgcattataccactatcatgagtcaaagcctctgtgttctgctagtgatggtgtcctgggcattttcctcttctaatggccttgtgcatactcttctctttgctcgtctctctctttttagagacaacactgtccaccattttttctgtgatctctctgctttgctgaagctgtccagctcagacactactatcaatgaactagtaatcctcactttagcagtggtggtcatcactgtaccattcatatgcatcctggtttcttatggccacataggggccactatcctaagaactccatccatcaagggtatctgcaaagccttgtccacatgtggttctcatctctgtgtagtttctttgtattatggagccattattgggttatattttttcccctcctccaataatactaatgataaagatgtcatagtagctgtgttgtacactgtggttacacccatgctgaatccctttatctatagtctgaggaatcgggatataaatggagcattgagaaagacactcagcaggagactgtgttcacactga

SEQ ID NO: 184 - DNA, 936 bp, Mus musculus
  MOR136-7
atgaggagagataatgagagcactgtgtctgagttcatcctcctggggctccccattcgagcagaggaacaaggcatgtactttgccctgttcctggccatgtacctgacaactgtgctggggaacctgctcatcatcctactcatcaggctggactctcacctccacatccccatgtacttcttcctcagccacttggccttcacagacatctctttctcatcggtcacagctccaaagatgctcgtgaatatgctgacacacagtcagtccatctcatatactgggtgtgtttcccaggtatatttttttgctatatttgctgatcttgatagctttcttcttacatcaatggcctatgacaggtatgtggccatctgccaccctctgcactattcacaaactatgagtcagacactctgtgttcttctagtacttgtatcctgggccttatccattgccaatgcccttgtgcgcacccttctcttggctcacctatctcactttagagacaataccattccccactacttctgtgacctctctgactggttgaagctgtccagctcagacaccaccatcaatgaattggttattcttgtcttaggcaatgtggtcattaccctgccatttatatgcattctggtttcttatggccacattggagtcaccattctgaagactccctctatcaagggaatctgcaaagccttgtccacatgtggctctcacctctgcgtagtttccttgtactatggagccatcattggactatattttgttccctcatctaataacactaatgacaaggatgccattgtggctgtgatgtacactgtggtcacacccatgctgaatccctttatttatagtctgaggaatcgggatatgaaaggagcactgagaaatatccttggtaggagactgtgttcataa

SEQ ID NO: 185 - DNA, 942 bp, Mus musculus
  MOR136-8
atgaagagcacaaggaaccagagcagtgcatctgagttcatcctcctggggctccccatccaaccagaggagcaaggcatgtactatgccctgtttctagctacatacctgaccacagtactggggaacctgctcatcatcctgctcatcaggctggactctcacctccacacccccatgtacttctttctcagccacttggccttcacagacatctctttctcatcagtcacagctccaaagatgctcatgaatatgctgatacacagtcaatccatctcatatgccgggtgcatttcccaggtgtattttttcttattttttgcagatcttgacagctttcttctgacttccatggcctatgacagatatgtggccatctgccaccccctccactatacaagaatcatgagtcagagtatctgtatcttactagtcattgaatcctggtttttatcatttgctggtgcccttgtgcacactattcttctagctcgtctctctttctttagaggtaacactgtccaccacttcttctgtgacttgtctgccttaattaagctatctagctcagatacctccatcaatgagcttgtcattcttgttgtaggatcattggtcattactgtgccatttgtatgcattctggtttcatatggacgcattggagccactatcctgaaaactccctccatcaagggaatttgcaaagccttgtccacatgtggttctcacctctctgtggtttctctctattatggagctattattggtctatattttgtcccctcatcaaatgacactaatgacaaggatgtcattgtagctgtgatgtacactatggtcacacccatgttgaatccctttatttacagtctgaggaatcgggatatgaaaggagctttgagaaatatgcttgcaagagcaacttcttccatgtaa

SEQ ID NO: 186 - DNA, 939 bp, Mus musculus
  MOR136-9
atgactgagggaaatgagagcattgtgtctgagttcatcctcttagggctccccattcagccagaggaccaagacctgtattctgccttgttcctggccatgtacctgacaactgtgctggggaacctgctcatcatcctgctcatcaggctggactctcacctccacacccccatgtactttttcctcagtcacttggctttcacagacatctctttctcatcagtcacagctccaaagatgctcatgaatatgctgacacatagtcagtccatctcatatgctgggtgtgttttccaggtgtattttttcttattttttgctgatcttgacaacttccttctgacctccatggcctatgacaggtatgtggccatctgccaccctctacactataccacaatgatgagtcagaacctctgtgttcttctagtagttgtgtcctggaccttatccactgccaatgcccttgtgcacacccttctcttggctcgcctaactcactttagagacaataccatctcccactatttctgtgacctgtctaccttgctgaagctgtccagctcagacaccaccaccaacaagctggttatacttcttttaggtaatgtgatcattaccctgccatttatatgtatactggtctcttatggcctcatagctgtcaccattctgaaaattccttctatgaagggtatctgcaaagccttgtccacatgtggctctcacctctgtgtggtttccttgtactatggagccatcattggactatattttgttccctcatctaataacactaatgtacaggatgccattgtggctgtgatgtacaatgtggtcacacccatgctgaatccctttatttatagtctgaggaatcaggatatgaaaggagcactgagaaatatcctcagcaggagactgtgtttacagtaa

SEQ ID NO: 187 - DNA, 933 bp, Mus musculus
  MOR127-2
atggagaatgagtccagtgtctctgaattttttctacaaggaatatcagggttctcagagcaacagcagctactctatggactttttctgtgtatgtatcttgtcaccttgactgggaatgtgctcattatcctggccattggctctgacccacaccttcacactcctatgtacttctttttggccaacttgtcctttgctgacatgggtttaatatcatctacagtgaccaagatgttgtttaatgttcagacaaggtgccataccatttcctatactggttgtctcacacagatgtatttctttctgatgtttggtgatctggacagcttcctcctggctgtgatggcctatgaccgctatgtggccatctgtcaccctctccactattccacaataatgagtgcccgagtctgtgccctgatgcttgccttgtgttgggttctcaccaacatagttgccctgactcacactctcctcatggctcgactgtccttctgtgttgttggggaaatagctcactttttctgtgacattactcctgtcctgaagctctcatgctctgacactcatgtcaatgaacttatggtatttgccttagggggtacagtactcatggtcccttttgtatgcattgttatctcgtatattcacattgtatttgccatcctaaaggttcgaacccctggtggcggtacaaaggccttttctacgtgtagttcccacctctgtgtggtctgtgttttctatggaacactcttcagtgcctacttatgccctccctctgtagtctctacagaaaaggatgttgcagctgctgcgatgtatacagtggtgactcctatgttgaaccccttcatctacagccttagaaacaaggatatgaaaggggccctaaagaggcttctatgtcataggaaatttttatcttaa

SEQ ID NO: 188 - DNA, 936 bp, Mus musculus
  MOR127-3
atggaaaaccagtccagtgtctctgaattttttcttcgaggaatatcagggtttccagagcaacagcagctactctatggactttttctatgtatgtatcttgtcaccttgactgggaatgtgctcatcatcctagctattagctgtgacccacaccttcacactcctatgtacttctttttggccaacttgtcgtttgctgacatgggtttaatatcatctgcagtgaccaagatgttgtttaatgttcagactcagcgccataccatctcctatactggttgtctcacacagatgtacttattcatgatgtttggtgatctggacagcttcttcctggctgtgatggcctatgaccgctatgtggccatctgtcaccctctccactattccacaatcatgagtgcccgagtctgtgccctgatgcttgccctgtgctgggttctcaccaacatagttgccctgactcacactctcctcatgactcgactgtccttctgtgttgttggggaaatagctcattttttctgtgacattacttctgtcatgaagctttcatgctcagacactcatgtcaatgagttagtgctttctggctttggaggtacagtactcatggtcccctttgtaagcattgtcatctcttatgtccgcatagtatttgctgtccttagggtccagacttctggcgggagttcaaaggccttttctacttgtagttcccatctctgtgtggtctgtgttttctatggaacactcttcagtgtctatctgttcccttcctctggagagaccacggagaaggatgttgtagcagctgcgatgtatacggtggtgactcctatgttgaaccccttcatctatagtctaaggaacaaggacatgaaaggggccctaaagaggcttctttgtcataggagaaaattttctccttag

SEQ ID NO: 189 - DNA, 948 bp, Mus musculus
  MOR136-10
atgagctgtatcataaggaataatcatagtatcacatctgagttcatcctcctggggctccctatcaatccagaactgaatggcatgtactctgccctgttcctggccatgtacctgacaactgtgctggggaacctgctcatcatcctgctcatcaggctggaccctcacctccacactcccatgtacttcttcctcagccacttggccttcacggacatctctttctcatctgtcacagctccaaagatgctcgtgaatatgctgacacacagtcagtccatctcatatacgggatgcatttcccaggtgtactttttcctattttttgcagatcttgacagctttcttctgacctccatggcctacgacagatatgtggccatctgccaccctctgcactataccaccatcatgagtcagagtctctgtgtactactgttaattgtgtcctgggtcttgtcctttgccagtgccattttacatacccttctgcttgcccatctctctttcagtgggggcaatactctgccccacttcttctgtgatctctctgctctgcttaagctgtctagctcagacaccaccattaacgaactggttatcttcactgtaggagtggtgatcataactgtgccattgatatgtattttggtttcttatggctacattggagccaccatcctaagaactccctccatcaagggaatctacaaagccttgtccacgtgtggctctcacctctccgtggtttctctgtactatggagccattattgggttatactcttttccttcacctaataacagtaataacaaggatgtaattgtggctgtgatgtacactatggtcacacccatgctgaatccctttatctatagtctaaggaatcgagatataaaaggagcactgagaaatattctaggcaggaaagcaagttcacagtga

SEQ ID NO: 190 - DNA, 954 bp, Mus musculus
  MOR127-4
atgggaaaaataagtagagtgaaccaatctgttgcttcagacttccttcttctgggactctctgaacagccaggggagcagcctcttctatttggcatcttcctgggcatgtacctggtcactatggtggggaacctactcatcatctttgtcatcagttctgatgcacacctacatactcctatgtacttcttcttagcaaatctctccttaactgatgcctgtttcacttctgcatcagtacccaaaatgcttgccaacatttatacccagagtcaaaccatctcctattctgggtgtcttactcagttgtattttctcctgatgtttggcggcctcgacaactgccttctggctgtgatggcatatgaccgctatgtagccatctgccagccactccattacagcacagccatgagtccccaactttgtgcattaatgctgtgtacatgctgggtgctgaccaactgtcctgcccttatgcacacactgctgctgacccgtgtggctttctgtgctcacacagccatcccccatttctactgtgatcccagtgctctgctgaaacttgcctgttctgacacccacattaatgagctgatgatcattaccatgggcttggtgtttctagctgttcctcttatgttgattgtcttctcctatgtctgcatttcctgggctgtgttgggtatcccttcttctggagggcgatggaaagccttttctacctgtggctcccatcttacagttgttcttctcttctatggatctctgatgggtgtgtatttacttcccccatcaactcactctacagagagggaaagtagggctgctgttctctacatgattgtaattcccatgctgaacccattcatctacagcttgaggaacagagacatgaaagaagctatgggtaaactttttggtggtggaaaaacagttttcttattgtaa

SEQ ID NO: 191 - DNA, 930 bp, Mus musculus
  MOR136-11
atgaggatggataatgagagcactgtgtccgagtttatcctcctggggctccccattcgagcaaaggaccaagctgtgtactctgccctgatcctggccatgtacctgacaactgtgctggggaacctgctcatcatcctgctcatcaggctggaccctcacctccacacccccatgtacttcttcctcagccacttggccttaacagacatctctttctcatcagtcactgttccaaggatgcttgtgaatatgctgacacaaagtcagtccatctcatatactgggtgtatttcccaggtgtattttttcatagtttttggaagcattgatagctttcttctaccttccatggcatatgacaggtatgtggccatctgccatcctctgcactataccctcatcatgaacctgaacctctgtgttcttctagtagtagtgtcctgggccttatctttagtcaatgctcttgtgcacacccttctcttggctcgcctatctcactttagaaacaatatcatcccccactatttctgtgacctctctgccttgcttaagctgtcaagctcagacaccagcatcaatgagcttgtcatccttgttttaggtaatgtggtcattactcttccattcatatgcattctggtctcttatggctacattggtgtcaccattctgaaaactccttccaccaagggaatccgcaaagccttgtccacctgtggctctcacctctgtgtggtttccttgtactatggatctgtcattggattatattgtgtcccctcatctaacaacactaatgacaaggatgccattgtggctatgatgtacactgtggtcacacccatgttgaatccctttatttatagtctgaggaatcgggatatgaaaagagcactgagaaatatcctcagcagaaaaaaatga

SEQ ID NO: 192 - DNA, 951 bp, Mus musculus
  MOR267-1
atgcccggtcagaactacagcaccatatcagaatttatcctctttggtttctcagccttcccacaccagatgctccctgctctgttcctgctctacttgctgatgtatttgttcactcttctggggaacctggtcatcatggctgctatctggacagaacatagactccacacacccatgtacctcttcctgtgtgccctctccatttctgaaattctcttcactgtcgtcatcacgccccgaatgctgtctgacatgctatccacccatcgatccatcacatttatagcttgtgctaaccaattgtttttctccttcacatttggctacactcactccttcctgctcgtggtcatgggctatgaccgctatgtggccatctgccgccccctgcattatcatgcacttatgagcctccaaggttgtgctcggcttgtggcatggtcttgggctggtggatcgcttattgggatggcattgacaataataatttttcaccttaccttctgtgaatctaatgtgatccatcacattctctgtcatgtgttttccctcttaaagttagcctgtggggaaaggacagcctttgtcactattgctgtgatcctggtgtgtgtcacacccctcataggatgcctggtcttcattatcctttcctatatctttattgtggccgccatcttgagaatcccatctactgagggccggcacaagacattctccacatgtgcatcccatctcactgtagtgattgtgcactacggctttgcctccataatttacctcaagtccaggggactctactcacagtacactgataccctcatgtccaccacctatacagtcttcacccccttccttagtccaattattttcagcctcaggaataaggagctgaagaatgctataattaaaagcttccacaggaatgtctgtcaacaaagtatctaa

SEQ ID NO: 193 - DNA, 948 bp, Mus musculus
  MOR266-2
atggaggaaggaaatcagactgggatggtcctcttccacttccgccccttctccaaactccctgaggtgcagatgctgatctttgtgcttttcctcatgatgtacctggtcagcatcgggggaaacatgtccatcgtcctcaccatctggaccaatcggtgtctccacacccctatgtacttcttcctggccaacctggctagcctggagatcttctactcttctaccatagcccccctgactctggccagcatcctgtccacagagaggactgtggtttccttggcaggctgtggtgcccagatgttcttcttcatcttcctgggcagtgctgactgtattctgctggctgtcatggcctatgaccggtttgtggccatctgtcaccctctgcgctataccctcatcatgagctggcacttgtgtgtccagctggccctggggtccctgttgctgggtttcatcttggccatgcagttgactgtgctcatcttccgactgcctttctgtagcagtaaggaaatcagcttgttctactgtgatgtcctccctgtcatgagactggcatgtgcagacacccatgtccatgaggccactctgtttgtggtcagtgtcatcgtcctcaccatccctttcctcctcatcactctctcctatgtcttcattgtggatgccatcctgaagatccgctcagctgaggggaggcacaaagccttctctacctgttcttcccacctgaccgttgtcctcctgcagtatggatgtggaagcctcatctacttgtgtcccagctccagctactctcctgagaggggccaggtagtatctgtggtttacaccttcatcactcctgtgctgaatcctttgatctacagcatgaggaacagagaactcaaggatgctttgaggaaggtggtgataagcttcctcctgcttgaaaaacaatga

SEQ ID NO: 194 - DNA, 939 bp, Mus musculus
  MOR272-1
atggatagttataatcaaacatttacaggtttcattttattgggattgttcccaccatcaaaaataggtctgttcctcttcattctcattgttctcatctttctgacagcttggattggtaacctgtccatgatcctcctcatcctcctggattcacatctccacacacccatgtattttttacttagtcagctttctcttattgacttaaattacatctctaccattgtccctaaaatggtatctgactttatgttaggtaataaatacatctccttcattgggtgtggatttcagattttcctcttcttgacttttgggggtgcagaaacccttttgttggcatctatggcctatgaccgttatgtggctatttgttttcctctccactatgccacacatatgaataaaagagtctgtgtgatgatgataacaggagcttggattctgggctccattaattcctgtgctcatactggatatgcactccaaattccttactgcagatccagagccatcaaccatttcttctgtgatgtccctgccatgttgactctggcttgcacagacacatgggtctatgagtatacagtgtttgtgagtacaatcctctttcttgtgtttccattcattggaatagtgtgttcctatggtcgtgttttccttgctatctaccgtatgcattctagggcggggaagaagaaggcctattctacctgtagcactcacctcactgttgtaactttctactacgcaccatttgcttacacctatctacgcccaagatccctccgatccccagaagaggacaagattcttgcagtcttctacacagttctcaccccaatgctaaatcctatcatctatagcctgagaaacaaagaagtgattggggccctgagaaggatgactcacagaatttgctttgcaaaaatatag

SEQ ID NO: 195 - DNA, 957 bp, Mus musculus
  MOR253-8
atgaactggatactccactcaacaatggtcagtcccaaccagacagtagtgacagagtttgtgctgcaagggttctcagagcacccaagtctaagactgttcctgatgggctgtttcctgtccctgtacacagtggctttaatgggcaacatggtgatcattgctttgatcacctcaagcactgggctccacagtcccatgtactttttcctgtgcaacttagcgaccatggatattatctgcacctcctctgtactgcccaaggcgctggttggtctactgtctgaggaaaacaccatctccttcaaagggtgcatgactcagctcttctttcttgtgtggtctggatcctctgagctgctgctgctcacagtcatggcctatgaccgctatgtggccatctgtttgcccctgcattacagctctaggatgagtccacagctctgtgggacctttgccgtgggtgtatggtccatctgcgcactaaatgcatctatcaacactggtctgatgacacggctgtcattctgtggccccaaggtcatcacccacttcttctgtgagattcccccactcctcctgctctcctgtagtcctacatatataaatagcgttatgactcttgtggcagatgccttttatggaggcatcaattttttacttaccttgctatcctatggctgcatcattgccagcatcctgcgcatgcgttctgctgagggcaagaggaaggccttttctacctgctcatcccacctcatcgtggtctctgtgtactactcatctgtgttctgtgcctatatcagtcctggttccagctacagcccagaaagaagcaaatttacctcggttttgtactcagtcctcagcccaaccctcaaccccctcatctatacactgaggaacaaggatgtcaagcttgccctgagaagactcttcccctctttctcaaattaa

SEQ ID NO: 196 - DNA, 969 bp, Mus musculus
  MOR112-1
atgcctttagaagcagagagtattatgagaaattccacagcagtgacagactttattcttcttggactgacagatgatccactgtggcagattgtggttttcacatttcttcttgttacctacatgctaagtgtgactgggaacctcatcattatcatcctcaccctctcagatgcccatctgatgacacccatgtatttcttccttcgaaatttctcactcctagaaatatcatttacatctgtctgcattcccagattccttgtcactattgtgacaggagacagaactatttcctacaatggttgcgtggctcagctattctttttcattttcttaggagtgacagaattttaccttctggctgccatgtcctatgaccgttatgtggccatctgcaaacctctacactacacaacaatcatgagcaaccgtgtgtgcattcttcttgtctttagctcatggtttgcaggattcatgattatctttccaccaattatccttctgttacagttagacttctgtgcctccaacataattgaccactttatctgtgactcttctccaattttgcagctttcttgctcaaacactcactttctcgagctcatggcattttcattagctgtggtaacactcatggtcaccttgacattaattattctttcctacacaaatattattcggacaattctgagaattccttctacaaatcagagaaaaaaggccttttcaacttgttcctcccatatgatagttgtctccctctcttatggcagctgcatcttcatgtacattaagccttctgcaagggagagggtgactttaagcaaaggagtagctgtactcaacacttctgtggctcctctcctgaaccccttcatctatacactgaggaaccagcaagtgaagcaagccttcaaaaacatgatccagagaatcttcttttcttcaaagaatttaccatga

SEQ ID NO: 197 - DNA, 939 bp, Mus musculus
  MOR111-1
atgagcaaccatacagaaactacagagttcattcttctgggattgtcagatgacccaaagctccaggttgtgatcttcgtctttctcttcatcacctacacactcagcatcacagggaacctgaccatcatcactctcaccttgctggattctcacctccagactcccatgtatttcttcctcaggaacttctctgttttagaagtatccttcacaaccgtcactatacccaagttcttaggcaccattatctcaggggataaaaccatttccttcaacaactgtatagcacagttattttttttcatccttttgggagtcactgaattttaccttctagctgccatgtcctatgaccgttatgttgccatctgcaagcccctgcattacctgactatcatgagtcagaaggtctgcacaatgctggtcttcgcctcctggctgacttctttcctaatcatcttccctgcactgatgttacttctacagcttgattattgtggctccaatatcattgatcactatacctgtgattatttccccttgcttcaactttcctgttcagatacaaagttcctggagaggatggggttttcctgtgctgtttttaccctaatgttaactttggtgttaatatttctgtcctatacatacatcatcaagacgattgtgaagattccttctgccagtcagaggtcaaaggccttttccacatgttcttcccacatgattgtcatctccatctcttatggcagctgcatttttatgtacattaaaccctcagctacagatagagcatcattgaccaagggagttgccatactaaatacctcagtcgcccccatgctaaaccccttcatttatagcctgaggaatcagcaagtcaagcaagcctttatgaacatgacaaggaagatagtgttttccacaagtaaatga

SEQ ID NO: 198 - DNA, 933 bp, Mus musculus
  MOR269-1
atggatgaggaaaaccaaactacaacaactgagtttctcctactggggttctctgacctcagagcccttcaggggccactgttctggttggtacttcttgtctacctgataacctttctgggcaactcactgatcatctttcttacccaaaccagccctgtgctgcactcccccatgtatttcttcctgcgccatctttccatggtggagcttctctacaccacagacattgtgcccagagttctggctgacttgacctcctcacatccccaggccatctccttcaggagctgtgcagcccagatgtacttcttcattgtcctgggtatctcagagtgctgtctcctcacagccatggcctatgaccgttatgcagccatctgtcagcccctgcactactctaccctaatgaaccaccgggcctgcatagccatggtgggaacttcatggatcatgggcatcatcacagctaccactcactcttccctcatcttcactctgcctttccctagccgccccatcatcccacacttcctctgtgacatcctgccagtactgaggctagcaagtgctgggaagcacaggagtgaaatttctgtaatgactgccacagtggtctttatcatgatccccttctctctgatagttacttcttatgcccgcatcctgggagccatcctggcaattgcttctagccagagccgccgcaaggtcttctctacctgctcctcccacttgcttgtggtctccctcttcttcggaacggccagcatcacatatatcagacccagagcaggctcttctgtcaccacagaccgcatccttagtctcttctacacagtggtcacacccatgctcaaccccatcatctataccctccggaacaaagaggtgataggggccctaaaacacatgaaaaggcaggttccctaa

SEQ ID NO: 199 - DNA, 939 bp, Mus musculus
  MOR114-1
atgagaaaccactcgtcaataacaacctttatccttctgggactaacagatgacccacaacttcaagttctgctttttatcttcctatttcttacatacatgctgagtgtaacaggaaacctgattatcatcatccttacgttggtggatccccatcttaaaacacccatgtactttttcctcagaaatttttctttcctagaagtttcctttaccactgtctgtattcctagatttctatacagtatatcaagtggagacaataccatcacctataatgcttgtgcaagtcaaatattttttgttattctctttggagcaactgaattttttctcttggcagctatgtcctatgatcgttatgtggccatctgtaaaccccttcattatatgaccatcatgaaccccagggtgtgtatcttactagtcatcacatgttgggtgtctggcctaatgattatcactccacctcttatcttgggcctccaacttgacttctgtgactccaatgccattgatcatttcagctgtgatgcaggtccccttctgaagatctcgtgctcagacacatgggtaatagaacagatggttatacttgtggctgtctttgcactcattattaccctaatctgtgtgattctatcctatacatacatcatcagaacaattctgagattcccttctgcacagcaaagaaaaaaggccttttccacctgctcatcccatatgattgtggtttctatcacctacggaagctgcatcttcatctacatcaagccatcggctaaggatgaagtggccataaataaaggagtttcagtcctcactacttctgtcgcacctctattgaatcccttcatttataccttaaggaacaagcaagtgaaacaggctttcagtgactctgtaaagagaattacatttatatcaaagagctag

SEQ ID NO: 200 - DNA, 936 bp, Mus musculus
  MOR117-1
atgagaaaccatacattggtgacaacctttattcttctgggattgacagaagacccaaagtggcaaattgtaatcttccttttcctatttatgacatatgtgctgagcatcactggaaatcttactattatccttctcaccctgttggattccaacctcaaaacgcccatgtatttcttccttcagaagttttccttcttagaaatctctctgacatctacttgcatccctaggttcctggtcagcatagtgaccatggataaaactatttcagtggaggcttgcttcacacagttatttgctgcctttatctttggcatagcacagtttttcttgctggctgtcatgtcctatgaccgctatgtggccatttgtagaccccttcattatacaaccatcatgaacaacagagtctgtacattgctgtttgtcagctgctgtttaattgctgtgtttgcgatctgccctggagtcattgtgagtctgagtttggaattctgtgatactattattgaacattttttctgtgactactcccccatcttgaagctttcctgcaatgatacaaggttcatgcaactgctcaacttcatttttgccatctttattctcctgatgaccttggcactggtaatgttctcttatgggaaaatcataagtacaattctgaggttcccctctgctcagcagcagaagaaggccttctccacctgttcctcacacatgattgttgtctccatctcttatggcagctgcatttttatgtacatcaaaccttctgctgaggagaggatatatttaaataaggggattgccattctcactcttgcacttgcacctgtactaaacccttttatatataccctaagaaataagcaagtcaaagaagccctaaaggacatcattaaaaagtgtacctcagctacttcaaagtag

SEQ ID NO: 201 - DNA, 939 bp, Mus musculus
  MOR112-2
atgccaaataagacatcaatcacagaatttattcttctgggacttacagatgacccagagttacaaattgtgatattcttcttcttgctggccacatacctactgagtgtaagtggaaatatgaccatcattaccctgacactgtcgaatgttcacttgaaaactcccatgtatttctttctcaggaatttttccttcttagaaattttatttacaacagtctgcattccaagatttctgatcagcatcattacagggaacacagctatttcctataatgcctgcatggcacaagtattttttttgatatttttgggagcgacagaattttttctactggctgcaatgtcctatgatcgttatgtggccatctgtaaacctctgcactatacagctatcattaacaacaaagtgtgcaatcaacttgtaattgcctcttggtcagctggattcctcattgtttttccccctgtaatcatgggccttcagctggagttctgtgactctaacatcatagatcacttcacttgtgactcttctcccatgctgcagatcgcttgcacagatacaaagattctcgagctgatggcatttttcttagcagtatttactctcatagtaacattggccttggtcattctgtcctacacactcatccttagaacaattctgaagataccttctgcagagcaaaggaaaaaggccttttccacttgttcctctcacatgattgtggtttccatttcatatggaagctgcatttttatgtatgtaaaaacatctgccagagaaggtgtggtgctaagtaaaggagttgccatgctcaacacctctgtagctcctatgctgaatcccttcatttacaccctaaggaaccagcaagtcaaacaggcattcaaggacttcacaagaaaattactggcatcaaagaagcactga

SEQ ID NO: 202 - DNA, 936 bp, Mus musculus
  MOR114-2
atgaaaaaccgaacagtaacaactttcattttgctgggtctgacagatgacattaggctgcaaactctactttttatctttctgcttttttcttacatgttgagtttatctggtaacctaaccatcatcaccctcactctgattgacccccatcttaaaacacctatgtatattttcctcaaaaatttctccttcttagaaatttcacttacaactgcttgtattcccagatttctatacagcctatcatctggggataagtccattgcctatgctgcttgtatcagtcaactgttgtttatagacatctttgcagttacagaattttttctcttggctatcatgtcctatgatcgctatgtggccatctgtaaacctctgcattacatgaccatcatgaatagcagagtctgcaagaacttcatcttcttctgttgggtagcagcactgatcatcgttctcccaccaattagcctaggtttgggcctggaattctgtgactcagatattgttgaccatttttgttgtgatgcagctcctctcctgaaaatctcttgttcagacacatggttgatagaacagatggtgatagctggtgcggtgttgacattcatcatcacctttgtgtgtgttgtcctttcttatggttatatcatcaagaccattctgagatttccctctgccaagcaaaggaaaaaggccttttccacctgttcttcccacatgattgttgtttccattacttatggtagctgcatcttcatttatgtcaaaccttcatccaaggataatgtagctatcaataaagggatttcacttattattgtatcaatttcaccaatgttgaatccctttatttatgcactgagaaacaagcaagtaaagcaagctttcaattactcaattaaaaaagttgcatttctctcaaagatgtaa

SEQ ID NO: 203 - DNA, 933 bp, Mus musculus
  MOR204-1
atggaggctcaaaaccacaccactgtgaaagaattcatccttttggggttaacagagaattccacactacgtgtcatcctatttatgatatttctaggaatatatactgttactttagtgggaaatttcagcatcatcagtttaataaggagctgcccccaactccacactcccatgtatctgttccttagccatctagctcttgtagacattgggttttccacatcaatcacacctataatgcttacaggattccttggacatacagtaacactctctgtggctgcttgtgtagcccaattctgcattgcagtgacatttgggacagttgagtgcttcctcctagctgtcatggcctacgaccgctatgtggccatctgctctcccctgctctattcaacacatatgtctcccaggatctgcttccttttagttggagcttcatatgtaggtggctgtgtgaattcagggacatttactagttgtctgttgattctgtccttctgtggaccaaatcagatagaccactttttctgtgacttccctgctgtgctgaaactttcttgctcagatgtctccattattggaattattccttctatctctgctggatccatcattgtgatcacagtgtttgtcatagctgtctcctacacctacattctcatcaccatcctgaatatgcgctccaccgagggtcgccacaaggccttctccacctgcacctcccacctcactgcagtcactctctactatggaaccattaccttcatttatgtgatgcccaaatcaaactactctactgcacagaacaagatactgtctgtattctacacagtggtgatccccatgctcaaccccctcatctacagtctgagaaacagagatgtaaaagaggctctcaggaaggccatcatcagaatatttccatag

SEQ ID NO: 204 - DNA, 939 bp, Mus musculus
  MOR204-2
atggagactgaaaatgacaccatggtgacagaattcattattttgggactaacagatagtgctacactacgtgctatcttatttgtgttctttctaccggtttatatagtgactgtagtgggaaatatcagtataatcctcctaattcggagcagcccacagcttcacacccccatgtacttgttcctcagccatctagcctttgtggacattggctactccacatcagtcacacctataatgctcatcagtttcttaagagaagaaactactatccctctcgctggctgtgcagcccagcttggctctgatgtagcttttggaactaccgagtgcttcctgctggccaccatggcttatgaccgctatgtggccatctgctcacccctgctctactccactcaaatgtccccagcaatctgctgcttcctgctcggggcatcctatttgggtggatgcatgaatgcttcatcattcacaggctgttttgtgaacctaaacttctgtggccccaacaaagtcaaccattttttctgtgatctcttcccacttgtgaaactgtcttgtggccatgcttatattgctgaaatatctccatccatctcttctgcctccgtccttgtgagcacgctctctacgatcattgtgtcttacatttacatcctgcactcaatcctaaggatgcgctctgctgagggaaggaacaaggctttttccacctgcacgtcccaccttactgcagtcactttgttttacgggacagttctgtttgtgtatgtgatgcccaagtccagctattcagctgaccaagtcaaagtggcctctgtggtctacacagtggtgatccccatgttgaaccctctgatctatagtttgaggaacaaggaggtgaaggaggcaatgaaaaaattaatggcgagaacacattggttcccttga

SEQ ID NO: 205 - DNA, 933 bp, Mus musculus
  MOR204-3
atggagactcaaaaccacacaactgtgacagagttcattcttctggggttaacagagagctccacactacgtgtcatcctatttatggtatttctaggaatatatactgttactttagtgggaaatttcagcatcatcagtttaataagaagttgcccccaactccacactcccatgtatctgttccttagccatctggcttttgtagacattgggttttccacatcaatcacaccaacaatgtttaaaggatttcttggaaatagactggtactctctgtagctgcttgtatagcccaattctgcatcacagtgacatttgggacagttgagtgcttcctcctagctgtcatggcttacgaccgctatgtggccatctgttcacccctgctctattcaacacatatgtctcccaggatctgtttccttttagttggagcttcatatgtaggtggctgtgtgaattcaggggcatttactagttgtctgtcgattctgtccttctgtggaccaaatcagatagatcactttttctgtgacttccctgctgtgttgaaactttcttgctcagatgtctccatcattggaattattccttcaatctctgctggatccatcattgtgatcacagtgtttgtcatagctgtctcctacgcctacattctcatcaccatcctgaagatgcgctccactgagggccgacagaaggccttctccacctgcacctcccacctcactgcagtcactctctactatggaaccattaccttcatttatgtgatgcccaaatcaaactactctactgcacaaaacaagatactgtctgtattctacacagtggtgatccccatgctcaaccccctcatctacagtctgagaaacagagatgtaaaagaggctctcaggaaggccatcatcagaatatttccatag

SEQ ID NO: 206 - DNA, 945 bp, Mus musculus
  MOR135-11
atggcagaagggaaccaaactgtcatcttccagttcctcctcctgggcctgcccatccccacagagcatcagcagctgtactatgccctgttcctgctcatgtacctcaccaccgtcttggggaacctcatcatcatcatcctcattcgactggactcccatctccacacacccatgtacttgtttctcagcaacttgtccttctctgatctctgcttttcctctgtcacaatgcccaaattgctgcagaacatgcagagccaggactcatccatcacctatgcaggatgcctgacacaaatgtactttttcttgctctttggagaccttgagagcttcctccttgtggccatggcctatgaccgctatgtggccatctgcttcccccttcattacatgagcatcatgagccccagcctctgtgtgagtctggtgctgctgtcctgggtgctgaccactttccatgccatgctgcataccctgctcatggccagattgtcattctgtgaggacaatgtgatcccccactttttctgtgacatgtctgctctgctgaagctgtcctgctctgacacccacgttaatgaattggtgatatttgtcacaggaggcctgatccttgtcattccatttgtgctcatccttgtgtcctatgcacgaattgtgtcctccattctcaaggtcccgtctgctcgaggcatccgtaaagccttctccacctgtgggtcccacctgtctgtggtgtcactgttctatgggacaatcattggtctgtacttatgtccatcagctgataactctactgtgaaggaaactgtcatggccatgatgtacacagtggtgactcccatgctgaaccccttcatctatagcctgaggaacagagacatgaagggagcattggccagagttatttgtaagaagaaagttttcttctgtctatga

SEQ ID NO: 207 - DNA, 954 bp, Mus musculus
  MOR135-12
atgcagggcaccacagaaaggaatcaaactgccatctcccagttcctcctcctgggcctgcccatccccacagagcatcaacacctgttctatgccctgttcctggccatgtacctcaccaccgtcctggggaacctcatcatcatcatccttattcatctggactcccatctccacacacccatgtattctttcctcagcaatttgtccttctctgatctctgcttttcatctgtcacaatgcccaaattgctgcagaacatgcagagccaggatccatcaattccctatgcaggctgcctggcacaaatgtactttttcctgttttttgcagaccttgaaagcttcctccttgtggccatggcctatgaccgctatgtggctatctgcttcccccttcattacatgagcatcatgagccccaggctctgtgtgagtctggtgctgctgtcctgggtgctgaccaccttccatgccatgctgcataccctgctcatggccagattgtcattctgtgaggacaatgtgatcccccactttttctgtgacatgtctgctctgctgaagctgtcctgctctgacacctatgttaatgaattggtgatatttgtcatgggaagcctgatccttgtcattccatttgtgctcatccttgtgtcctatgcacgaattgtgtcctccattctcaaggtcccgtctgctcgaggcatccgtaaagccttctccacctgtgggtcccacctgtctgtggtgtcactgttctatggaacagtcattggtctgtacttatgtccatcagctgataactctactgtgaaggaaactgtcatggccatgatgtacacagtggtgactcccatgctgaaccccttcatctacagcctgaggaacagagacatgaagggggccctaattagtgttctttgcaagaagaaaattcttttctgtctatga

SEQ ID NO: 208 - DNA, 945 bp, Mus musculus
  MOR135-13
atgacagaaaggaacaaaactgtcatctcccagttcctcctcctgggcctacccattccaccagagcaccagcaactgttctatgccctgttcctggtcatgtacctcaccaccgtcctggggaacctcatcatcatcattctcataatactggactcccatctccacacacccatgtacttgtttctcagcaacttgtccttctctgacctttgtttctcctctgtcacaatgcccaagttgctgcagaacatgcagagccaagttccatcgattccctatgcaggttgcctggcacaaatatacttctttctgttttttggagaccttgggaactttctccttgtggccatggcctacgaccgctatgtggccatctgttacccccttcattacaccaccatcatgagccccaggctctgtgtgagtctagtggtgctgtcctgggtgctgaccaccttccatgccatgctgcacaccctgcttatggccagattgtcattctgtgaggacaatgtgatccctcactatttctgtgatatgtctgctctgctaaagctggcctgctctgacacccgtgttaatgaggtggtgatatttattgtggccagcatctttcttgtccttccatttgcactcattaccatgtcctatgtaagaattgtgtcttccattctcaaggtcccttcttctcaaggtatctacaaagccttctccacatgtggatctcacctgtctgtagtgtcactgttctatgggacagtcattggtctctacttatctccttccagtaataattctactgtgaaggatactgtcatgtctttaatgtacacagtggtgactcccatgctgaacccctttatctacagcctgaggaacagagacataaagggggctctggaaagagtcttttgcaaaaggaaaattcaactaaacctataa

SEQ ID NO: 209 - DNA, 942 bp, Mus musculus
  MOR262-1
atgccaggagaaaatgtcactgtttggagcctttttttcctagagggattttcccggtacccgaggttagagattgttctgtttgtcttcagccttgtcatgtatctggttaccatcctgggtaactgtactcttatcttaatcactgtcctggattcacgccttcaaacccccatgtacttgtttcttggaaacctctctttcatggatatctgttacacgtctgcttctattcccactttgcttgtgaacttgctgtcatctaagaaaaccattatcttttctgggtgtgctgtgcagatgtacctgtccctttccatggggtccacagagtgtatacttctggcggtgatggcctatgatcgttatgtggccatctgtaaccctctgaggtaccccatcatcatgaacaggcaagtctgtgtgcagatggccaccatctcctgggtgacaggctgtctgactgctctgctggaaactagttttgccctgcagattcccctctgtgggaacatcatcaaccatttcacatgtgaaattcttgccgtgctaaaactagcttgcgtgagttccctgctcatggacctggttatgctggtggtcagtattctccttctgcccattccaatgctcttgatttgcatctcttatggcttcatcctttctacaattctgaggatcagttcaacagagggaagaaacaaagctttttcaacctgtggtgcacacttgactgtggtgatcttatattatggggctgctctctccatgtacctgaagccttcttcatcaaactcacaagaaatagacaaaatcatctcgttgctttatggagtgcttacccctatgttgaacccaataatatacagcttaagaaacaaagaagtaaaagatgcagtgataaaactgctgggcaaagtgcccttggcaccaagtgtgtga

SEQ ID NO: 210 - DNA, 939 bp, Mus musculus
  MOR238-2
atgcccaacagcattcaactgagagaaaagagaatgaacgtgactgaattcatcctcatgggactaacacagaatccccagcttcagagaattctattttttgtgttactcatcacctacatcattactgtcacaggaaacctgctcatagtggggaccatagtctgtagccagtctttgaactccccaatgtactttttcttgacttttttatctctgatagatgcatgctattcctcttgcacaatccctaagatgctggtagatttgctctcagaaacaaaaaccatctcattcaatggctgcatattgcaactttttgttgaacatttcttaggagcttcagagattgtccttcttgtggttatggcctatgaccgctatgtggccatctgcagacctctgcactatgcctccaggatgaaccaccatatgtgctgtcttctagtgggaatatgttggatagtgggttttctacattcctttggtcagatacttgttactctctggattcccttctgtggccccaatatattggatcacttcttttgtgacatcttccccttgctacaacttgcctgcactgacactttccttcttggactcctggttgcttgcaatggtggtgtaatccctgtgatcaccttcacgatgctattgatgtcctatgcagtcattctttactccttgagaacacatagcactgcagggaggaaaaaggccctctctacctgtggctctcacatcacagttgttgtattgttttttgtgccatgtatttttatgtatatgcgaccagtggcaacctttcccatggataaagcaatagccgtgttttatatcatcatcacacctttgttaaatcctgttatctacactgtaaggaacgcagaggtaaaaagtgccattagaatgctcttaaaaagaatgcacttgtga

SEQ ID NO: 211 - DNA, 930 bp, Mus musculus
  MOR225-1
atggggaatgttactgtgtttattctcttgggactttctgacaatcaaaacattgaagtcctctgctttgtattatttctattttgctacattgctatttggatgggtaatgttctcataatggtttctatcacatgcactcagctcatggaccaacctatgtatttcttcctccattatttatcactttgtgatctttgctacacatccacagtgactcccaaactcctgactgatttactggcagaaagaaagattatttcctataataactgcatgacacagctctttgttcttcatttccttggtgccattgagatcttcattctcacagcaatggcctatgaccgttatgttgccatctgcaggcccctgcactacactgtcattatgagcagacagagatgcaacgaaatccttgcagcttgttgtactgggggatttgtgcactcagccagtcagtcacttctcattgcttgtttgtccttttgtcatcacaatgagatagatcactacttctgtgatgtatatcctttattgaaattggcttgcactgatacacatagaattggcctctttgttattgttgattctggcttaattgctttggtgacatttgtagttttaatggtatcttattttctgatagcatacaccattagtgtttaccctgcagagagtcgttccaaagctctttcaacatgtagttctcatataaccattgtggtcctgttttttgtgcctgttttcttcatttacatcagaccaaatataacattcccagaagacaaagtgtttgctcttttctacaccatcatagctcccatgttcaaccctctgatctacacactgagaaacatagagatgaagcgtgcaattaaaaaaatgtggtatcatcaaataccttcatacaagaaacaaattccatga

SEQ ID NO: 212 - DNA, 924 bp, Mus musculus
  MOR225-2
atggaaagtaccaataatatcactgaatttatactgttaggactttcccagaacaagaaaattaaagctctatgttttctgatgttcttgttttgttacatagctattttgggaggaaacatgatcattttgatttctatcacatgtagccagctaattgagcaaccaatgtatttctttcttaattaccttgctttgtcagacctgtgctatacctccacagtgacacccaagtttctcactgaccttctcgtagaaaggaacaaaatttcttataccagctgcatggctcagctttttacaatgcacttctttggagggattgagatcctcatactcacagtgatggcctatgaccgctacgtggccatctgcaagcccctgcactattccatcatcatgagcagagggaggtgtcatgccatggtcactgcttgctgtgctggggcttttatacattccttcctccagagcctccttgctatcagcctccccttctgtggccacaatgagatggatcactatttctgtgatatttatcctttggtaactctttcctgcaccaatacacacagagtcggacttctggtggttgtcaattcaggcatgatgggactggtcaccttcgtagtcttgatgtggtcttactctttcattttatacaccatcagggcttatcctgcagagagccgcagcaaagctctttccacatgcagttctcatgtcaccgttgtcattttcttctttgtgcctgtactttttatttacatcagaccagccaccacttacccagaagataaagtgtttgctcttttctacaccatcttagctcccatgttcaaccctctgatctacactctgagaaacacagagatgaagaatgctttgagaaaagtttggtgccacaaactattttttatctga

SEQ ID NO: 213 - DNA, 942 bp, Mus musculus
  MOR103-6
atggagagatctctacaactggccaataggtctgatgaccaggattttattctactgggtttgtctgccagtaaagacatcaaggacggcctgtttgttatatttctgactctctacctgctgatcttcctagagaatatgttagttatctacctcatcagcagtcaccatgagttgctccacaaacccatgtacttcttcttgggcaatctcagctgcctggaaatgtgctatgtgtcagtcaccatgcccaccctactcgtgggcctgaggtccagcccttaccatgtgtccttttcattctgcatggctcaactgtttttattcatgtctctcattggcaccaagtgcaccctcctggcctccatggcctatgaccgctatgtggccatctgctgtccactgcactactcagtgatcatgaggccccaggtctgttggggattggccttgtcctcctgggtgggtggactgttggtttctgcgatcaagaccacatgcattgcaagtctgtcctactgtggccccaatgtcctcaaccatttcttctgtgatgtctcccctctgctcaatttgtcctgtacccatgtggccctcacagagctgatcgactttatctcagccatcatcatcttctgtgggtcattgctggttgctctggcctcttatgtggctattggtagggtactaatcaaaatgccttcagcagctgcgagccacaaagccctctccacctgtgcttcccacctccttgtaatgggtcttttttactctgttgtcctctttatgtattccaggcccagtcatgtcaaatccacagacctcaacaaggtgctgtcagtcatctacacggtggctacgcccatgtgcagcccaatcatctactgcttgaggaatagggaggtccatgcagtgttgaggagaaccccttgtctgtgctga

SEQ ID NO: 214 - DNA, 945 bp, Mus musculus
  MOR103-7
atggagaagtcacttgagttgggcaatgtgaccagagtccaggagtttgtcctattgggcttgtccacaaggctgggaataagggacgccctgtttgtcatcttcctgactctttacctgctgaccctcctggagaacacactcatcatctacctcatctgcagtcacagcgagctccacaagcccatgtacttcttcctgggcaacctcagctgcctggagatgtgctatgtgtcagtcaccatgcccacactactcatggggctatggacggggccctgtcatgttccattcacaggctgcatgacccagcttttcttcttcatctctctcatctgcacagaatgcactctcctggcctccatggcttatgaccgctatgtggccatctgccgtccactgcactacccactgctcatgaggccacaggtctgcctgggcttagccttgtcttcatggctaggtgggctgctggtctcagtgatcaaaacagcatgcattgcaagcctgtcctattgtggccccaatgtcctcaaccacttcttctgtgatgtctctcctcttcttaacttgtcctgcacccatgtggccctcacagagctggtggacttcatctcagctattgtcatcctctggggttcactccttgtggccatggcctcctatgtggccattggtaggacagttctaggcatgccatcagctgctgctcgccacaaagccttctctacctgtgcctcccacttggtagtggtgggcatcttctactcagccactatcttcatctatgcccgacccagccgcatagaagccatggaccttaacaaggtgctgtctgtcatctacacggtggtcactcccatgtgtaacccagttatctactgcctcaggaacagggaggtgcaatcagctttccacagaaccatgcgctggtcttcagtttga

SEQ ID NO: 215 - DNA, 939 bp, Mus musculus
  MOR103-8
atggagaggtccctggcgttggccaacatgaccagggttcagcagttcatcttgctgggattgtccactaggctggacataagggatgccctatttgctgtcttcctgactctctacctgctgaccctcctggagaacacactcatcatctacctcatctgcagtcacaaagagctccacaagcccatgtacttcttcttgggcaacctcagctgcctggagatgtgctatgtgtcagtcaccatgcccaccttactcatggggctatggaatggactctaccatattcccttcatagcttgtatgacccaactcttcttcttcattgtccttgtgggcacagagtgcattcttttggcatccatggcgtatgatcgctatgtggccatctgccgcccactacactacccagtactcatgaggccccaggtctgcctgggcttggctatgatttcatggctaggtgggctattggtttctatgatcaagacaacatgcattgccaccctgtcctactgtggccccaatgtcctcaaccattttttctgtgatgtttccccattactcaacctgtcatgtacccatgtggccctcacagagctggtagacttcatctcagccattgtcatcctttggggttgcttcctcacgactatggcctcctatgtggctattggcagggcagttctgcgcatgccttctaccactgcccgctacaaggccttctctacctgtgcctcccacctggtcgtggtgggcatcttctactcagtcactatcttcatctatgcccgccccaaacgcatagaagccatggatctcaacaaggtgctgtctgtcatctatacagtggtcacccccatgtgcaacccagttatctactgtctgcggaacaaggaggtccaagtagctcttcacagaaccatgcactggtcctga

SEQ ID NO: 216 - DNA, 939 bp, Mus musculus
  MOR103-9
atggctagatccttggagctggccaacatgaccagggttcagaagttcctcttgctgggattgtccactaggctggacataagggatgccctatttgctgtcttcctgactctttacctgctgacacttgtggagaacacactcatcatctacctcatcttcagtcacaaagagctccacaagcccatgtacttcttcctgggcaacctcagctgcctggagatgtgctatgtgtcagtcaccatgcccaccttacttgtgggtctatggacggggccctaccacattcccttcacactctgcatgacacaactcttcttctttatagtcctcatctgcacagagtgcaccctcttggcttccatggcttatgatcgctatgtggccatctgccgcccactacactacccactgctcatgaggccccaagtatgtttgggcttagccttgtcttcatggctaggtgggctgattgtctcagtggccaaaacaacatgcattgccagtctgtcttactgtggccccaatgtcctcaaccaatttttctgtgatgtctcccctctgctcaatttgtcctgtacccatgtggccctcacagagctggtagacttcatctcagccattgtcatcttctgtggaacactcttggtgtccctagcctcctattcagctattgggatggctgtactccgcatgccatcagctgctgcccggcgcaaggccttctccacctgtgcctcccatctggtagtggtgggcatcttttactcagcagctctcttcatctattgccgccccagccgcatcaagtccatggacctcaacaaggtgctgtctgtcatctacacagtggtcacacctctctgcaaccctatcatctactgtctgagaaataaggaggtccacactgtgctgaaaaagactctccattggccttga

SEQ ID NO: 217 - DNA, 930 bp, Mus musculus
  MOR253-9
atgatgagaaaccagacactggtaacagagttcatccttcagggcttctctgagcacccacagtaccagctgcccttgtttttctgtttcctctccctttactgtgtggccctcacaggtaatgtccttatcatcttggctatcacctgcaaccctgggctccacacccccatgtattttttcttgtttaatttggctactatggacatcatctgtacctcctccattatgcccaaggccctgaggggtctggtgtcaaagaggaaccccatctcctacggtggctgcatggcccagctctatttccttacatggtctgcttcctcagagttgctcctcctcactgtcatggcctacgaccgttatgcagccatctgccaccctctgcattacagcaccatgatgagcaaagcattctgtagcatgttggctgctggagtgtgggcactctgcgctttcaacacagccattcacacaggactgatgactcgcttgagcttctgtgggcccaatgtcattacacatttcttctgtgaggtgcctcctctgctgcttctctcctgcagctccacctacgtgaacagtgtcatgattgtcttggctgatgccttttatggcatattgaacttcctgatgaccattgtgtcatacggcttcatcatttccagcatcctgaagatgcggacatcagaagggaagcagaaagccttctcaacctgctcttcccacctcattgtggtgtgcatgtattacaccgctgtcttctatgcctacataagccctgtctccagctataatgcagagaagagcaaattggctggtgtgctgtataccatgttgagccctacgctcaaccctctgatctatactttgagaaacaaggaagtcaaagcagctctcaggaaattttttcctttcctcagaaattaa

SEQ ID NO: 218 - DNA, 924 bp, Mus musculus
  MOR129-1
atggatggagacaatgagactatggtggcagaattcctccttctggggctctctggaaagtcagagcaggaggaagtcgtctttggaatgttcttaggcatgtacttggtcaccatctctgggaaccttctcatcatcctggccatcagctgtgaccctcatctccacacacccatgtacttcttcttggccaacctctccagtgttgacatctgcttttcctcagtcactgtccccaaggctctggtgaaccacgtgttgggaagcaagtccatctcttacacagagtgcatgatccagatctatttcttcatcacattcatcaacatggatggcttcctcctgagtgtgatggcctatgaccgctatgtggccatctgtcaccctctccactacaccatgatgatgagatccagactctgtgtcctcctggtggccatatcatgggtcatcacaaacctgcatgctctcttgcatactctcctcatggttcgactcaccttctgttcccacaatgcagtgcaccacttcttctgcgacccctaccctatcctgaagctctcttgttctgacaccttcatcaatgacctgatggtcttcactgtgggtggagtgatattcctgacaccgttttcatgcattgttgtttcctatgtttacatcttctctaaggtcctgaagataccatctgcccgcgggataaggaaagccctgtctacatgtgggtctcacctcactgtggtctccctcttctatggggcgatcctgggtgtctacatgcgtccttcatcctcatattctctgcaggacacggtggctactgtcatctttacagtggtgactccattggtcaatcccttcatctacagcctgaggaatcaggatatgaaaggagccctaaggaagataatgctcagatcctag

SEQ ID NO: 219 - DNA, 948 bp, Mus musculus
  MOR129-2
atggtcagagagaaccagtcaacagccatagaattcctccttctgggaattgctgggcagtcaaaggaggaagaggtcatcttcggaatgttcttgtggatgtacttggtcaccgtttgtgggaaccttctcatcatcctggccatcagctgtgaccctcatctccacacacccatgtacttcttcttggccaacctctccagtgttgacatctgtttttcctcagtcactgtccccaaggctctggtgaactacatgttgggaatcaagaccatctcttacacagagtgtatgacccagatctatttcttcatcacattcatcaacatggatggcttcctcctgagtgtgatggcctatgaccgctatgtggccatctgtcaccctctccactacaccatgatgatgaggcccagactctgtgttctcctggtggccatatcatgggccatcacaaacctgcatgctctcttgcatactctcctcatggttcgactcaccttctgttcccacaatgcaatgcaccacttcttctgtgacccctaccctatcctgaagctctcttgttctgacaccttcatcaatgacatcacagccttcactgtgggtgggctgacctctatcacaccgttcacatgcatcactgtttcctatgggtatattctctccaatgtgctgaagttcccatctattcagggaataaggaaagccctgtctacttgtgggtctcacctcactgtggtctctctcttctatggggcgatcctgggggtctacatgcacccttcgtctacatattcagtacaggacatggtggccactgcctttttcacagtggtgacacccatggtcaatcccttcatctacagcctgaggaatcgtgatgtcaaaggagccctcaggaaactcatgtgtaggagactcacttcttcgagattctacaactag

SEQ ID NO: 220 - DNA, 924 bp, Mus musculus
  MOR129-3
atggatggggacaatcaaacaattgtcacagaatttatcctcttgggactcactagacagtcagagaaagaagaggttgtgtttgggttgttcttatggatgtacttggtcaccatctctgggaaccttctcattatcctggccatcagctgtgaccctcatctccacacacccatgtacttcttcttggccaacctctccagtgtcgacattagtgctccatctgtcattgtccccaaggcattggtgaatcatatgttgggaagcaagtccatctcttacacggggtgtatgacccagatctatttcttcatcacattcagcaatatggatggcttcctcctgagtgtgatggcctatgaccgctatgtggccatctgtcaccctctccactacaccatgatgatgagacccagactctgtgtcctcctggtggccatatcatgggccatcacaaacctgcatgctctcttgcatactctcctcatggttcgactcaccttctgttcccacaatgcagtgcaccacttcttctgtgacccctaccctatcctgaagctctcttgttctgacaccttcatcaatgacctgatggtcttcaccattggtggattggtatttatgactccatttacatgcattattgtttcctatgcctacatcttctctaaggttctgaagttaaaatctgcccatggaataaggaaagccctgtcgacgtgtgggtctcacctcactgtggtctccctcttctatggggcgatcctgggcatctatatgcacccttcatctacatacacagtgcaggacacagtggccaccgtcatcttcacagtagtgacacccatggtcaaccccttcatctacagcctgaggaatcgtgacattaaaggagccctgaggaagataattctccgatcttag

SEQ ID NO: 221 - DNA, 918 bp, Mus musculus
  MOR248-1
atggaagaagcaaaccagactgtggtgtctgagtttatttttcagggactttgtgcttcaaaggaactacagatcttgctcctgctgccattttccaccctctacatgatgactgtggtaggcaacctctttgtagtgatattgatcatcattgatcatcatctccattctcccatgtactttctgttagctaatctatcatttattgacttctgcctttcctcagttaccacccccaaactgataactgacctcctaaaagataacaaaaccatttcctttgggggctgcatgagccagatcctctgtgtgcacttctttggaggaggtgagatggtgcttcttgtaacaatggcctatgaccggtatgtggccatctgcaggccactccactacagcagcatcatggacagacagaagtgcatctggctcgttgtgatatcatggaccattggctttatacatgccatgagtcaactgatactgattttggatctgcctttctgtggacctagagtgatagacagctttttctgtgatattcctttagtgatgaaattagcctgcatgaatactgatactctgggaatagtgataaatgctgatagtggtgtcttagcaacaacttgtttcatacttttattgatctcttacacttatattttactaactgttcagcttcactctaaagatggctcatcaaaggcgctctctacatgtacttctcatattatagtggttgtgctgttctttggaccctgcattttcatctatctgtggccagtcagcatcacttgggtggacaagtttctagctgtgttttacacagtcatcacacctctcctgaatccagcaatctatacactgaggaataaagatattaaaaatgccataaagaagctgaaaaatcacatgtga

SEQ ID NO: 222 - DNA, 918 bp, Mus musculus
  MOR248-2
atggaagactctaatcgtactgtgtcctctgagtttatttttcagggactgtgttcctcaaggcaacttgagatcttcctcttactaccattttccatcctctacctgatggctgtggtaggcaacctgtttgttgtgatattgatcatcattgatcatcatctccattctcccatgtacttcttgttagccaatctatcatttattgacttctgcctttcttcagtaaccacccccaaactgaccatagatctcctaaaagaaaataaaaccatttcctttgtagggtatatgaggcagatcgtctgtgtgcacttctttgcaggaggtgagatggtacttcttgtaacaatggcctatgaccggtatgtggccatctgcaggccactccactacagcagcatcatggacagacagaagtgcatctggctcgttgtgatatcatggattgttggatttgtgcatgccattagtcagatgctcttgattttggatctacctttctgtggacctagagtgatagacagctttttctgtgatattcctttggtgatgaaattagcctgcatgaatactgatactctggaaatcctaataaatgctgacagtggcattttagcaacaacttggttcatcctcttgcttatatcttatacttacattctattaactgttcaacatcgctctaaagatggctcatcaaaggccctatctacatgcacatcccatatcatagtggttctgctgttctttgggcccatcatttttatctatctgtggccagtcagcatcacctgggttgacaagtttcttgctgtattttactcagtcatcacacctctccttaatccagccatctacacactgagaaataaagatattaaaaatgccataaagaaactcataagtcacaagtga

SEQ ID NO: 223 - DNA, 918 bp, Mus musculus
  MOR154-1
atggaattagaaaaccagacaagagtaatagaattctttctcttgggcctctcagaggatccagaacttcagcccatcctctttggactgttcctgcttatgtacctagtgacagtctctgggaacctgctcatcatcctggccattgtctctgacgctcacctccacactccaatgtacttcttcctctcaaacctgtccttcactgatatctgcttcagcaccaccactgttcctaagatgctgacaaaccttcagaaacagagcaaatccatcagttacacaggctgcattacccagcttagctttgtcctactttttgctggaatggaaaactttcttcttgcagcaatggcttatgaccgttatgtggccatctgcaatccccttcgctacacagacatcatgaaactccatttgtgttttgtgatgatttttttgtctttgtacattagcattgtggatgcccttctacatggcttaatgacattgcgtctatctttctgcacatttcttgaaattccccacttcttctgtgaactttatcaggttatcaagattgcatgttctgacactctcatcaataacattttgatatatgtcatgagtagtgcattaggtggtatgcccctagtagggattattttctcttactataaaattatctcttccatcctcagaatgccatcaccaggcggtaggcataaggctttttcaacatgtggatctcatctgtcagtggtttccttgttctatgggacagcttttggggtatacattagttctgcatttacagagtcatacaggagaacttctgtagcatcattgatgtatactgtgtttccgcctatgctgaacccatttatctatagtctgaggaacaaagatatgaagaaagctttgagaaaaatagtctga

SEQ ID NO: 224 - DNA, 939 bp, Mus musculus
  MOR155-1
atggaatctgcaaaccaaacaggtatttcagaattctttctcataggactaatatatgtccctgaactgcaacccctctttttcgacttgttcttgtccatgtaccttatcaccatcattggaaacctactcattatactggctgtaagcaaagactcccgccttcacacgcccatgtacttctttctctgcaacctatctttcactgatatctgcacaagcacaacaacagtcccaaagttgctgttgaacatccaagtacatgaccagagcatcacttatataggctgcttgtctcaggtatgttttatcttgacattttgtgttttagaacgctgtctcctcactgtgatggcttatgaccgctatgtggccatttgccaacctctaagatatacaatcattatgaaccctttcctatgcatttgcctagtattactttccctgatcatcagcactataaatgcactactccatacacttctggtattgccactgtccttctgcacagaacagaatgtccccaacttcttttgtgagcttggtcaaatcacaaagctttcctgctctgatacatttatcaatattctttttatttatactgcgaccattgtattttcagttatcccactatctgggattattttttcttatattcaaattgtgtcctctattctgaagatcccatcagttggtggaaggcataaagcattttccacctgtgggtctcatctttcagtggtatctttattctatggcactggtttaggtgtgtacatgaatgcttcagtttctaactcttccattagcaatgtaataacatccatgatgtacagtgtggtccctcaaatgctaaatccttttatctacagtttgaggagcaaagaaataaaaggatccttgaggcagctcatcattgggatcatttgttttccatag

SEQ ID NO: 225 - DNA, 936 bp, Mus musculus
  MOR141-1
atgaaaccagaaaaccaaacaaatattttagaatttttgcttctggggttttcccaatatccagagcatcaacccatgctatttggactgtttctgctcatgtttgtggtcgctgtgcttgggaatcttctcatcattctggccgtcagcattgactctcacctgcatactcccatgtacttctttctatctaacctgtccttttctgacattggtttcatctctacaactgtccctaagatgttggtgaatatccaaacacagagcaagtccatctcctatgcagaatgcatcacccagatttattttttcatgctctttggaggcatggacacacttctcctcaccgtgatggcctatgaccgatttgtggccatctgtcacccacttcactattcagtcattatgaatcctcaactaagtggtttgctagttcttgtatcatggtttattagcttttcatattctctgatacagagtctattgatgctgcggttgtccttctgtacaaatcagataattaaacacttttactgtgaatatgccaaagccctcactatagcctgctcagatacactaatcaatcatatccttctttatattgtgatatgggtccttggcttcatccctttctcagggatcctttattcatactataaaattttttcttcaattttgagaattccatcaacagatggaaaatataaagcattttctacctgtgggtctcatctatcggtggtttctttattctatgggacaggccttagtgtgtaccttagttctgatgctacttcctcctctgggaagggcgtggtggcctcagtaatgtatacagtggtcacccccatgctgaaccctttcatctacagcttgaggaacaaagacattaagaaggccttaaaaacacttgggagaatacttcttttaaagtga

SEQ ID NO: 226 - DNA, 936 bp, Mus musculus
  MOR141-2
atgaaaccagaaaaccaaacaaatattttagaatttttgcttctggggttttcccaatatccagagcatcaacccatgctatttggactgtttctgctcatgtttgtggtcgctgtgtttgggaatcttctcatcattctggccgtcagcattgactctcacctgcatactcccatgtacttcttcctatctaacctgtccttttctgacattggtttcatctctacaactatccctaagatgttggtgaatatccaaacacagagcaagtccatctcctatgcagaatgcatcacccagatttattttttcatgctctttggaggcatggacacacttctcctcaccgtgatggcctatgaccgatttgtggccatctgtcacccacttcactattcagtcattatgaatcctcaactaagtggtttgctagttcttgtatcatggtttattagcttttcatattctctgatacagagtctattgatgctgcggttgtccttctgtacaaatcagataattaaacacttttactgtgaatattctagagccctcactatagcctgctcagacacactaatcaatcatatccttctttatattctgatatgtgtccttggcttcatccctttctcagggatcctttattcatactgtaaaattgtttcttctattttgagaattccatcaacagatggaaaatataaagcattttctacctgtgggtctcatctatcagtggtttctttattctatgggacaggccttggtgtgtaccttagttctgatgtaacttcctcctctgggaaggacgtggtggcctcagtaatgtatacagtggtcacccctatgctgaaccctttcatctacagcttgaggaacaaagacattaagaaggccttaaaaacacttgggagaatacttcttttaaagtga

SEQ ID NO: 227 - DNA, 936 bp, Mus musculus
  MOR233-3
atgcaaaatcaaagccttgtcaatgagttcatactcctgggtctttctcagaacacaaaagttgagaaaatattgtttcttctatttttgttaatctaccttgcaactattggtggcaacatgataattgtggcaactatcatctacagccctgcactgctgggctcccctatgtacttcttcttggtattcctgtccttactggatgcatgcacttctactgttgtaacacctaagatgatcgtaggcttcttctatgaaaggaagatcatttcttttgaaggctgcatgacccaattgtttgccatacacttctttactgcggtagaggtgattgtactgtcagctatggcctatgaccgttatgtggctatttgcaaacccttgcactacctgtccattatgagcaagagggtctgtggtgtgttggtaggcatagcatgggctgggggattcttgcattctatcatacaaattgtgtttactttgcaattaccattctgtggacccaatgttattgaccattatatgtgtgacttgttcccattactgaagcttgcctgcactgacacacaaatttttgttattttggtgtttgccaatagtggttctatctgcatcattatcttctccttgcttcttgtctcctatggtgtcatcttgttctctttgagagcccacagttctgaagggcgatataaagctctctccacctgtgggtcccatattacagtcgttgttttattctttgttccatgcatattaatatatgcacgaccttcatctccattctcctttgaaaaaaacacacttatatttgccaatgtcctgacaccattgctcaatcctatggtttatacattcaggaataaggaaatgaagagtgccataaggaaaatgtggaagagattggtagtggtttctgataaatattaa

SEQ ID NO: 228 - DNA, 915 bp, Mus musculus
  MOR233-4
atgcaaaaccagagctttgtcactgagttcatactcctgggactttcacagaacctgaatgtggagaaaatgctatttgttttatttttgtttatctacattgcaactattgggggcaacatgatgattgtggtgaccatcatctacagccctgcactgctgggctcccccatgtacttcttcttggcattcctgtccttcctggatgcatgcacttcttctactgtcacacccaagataattgtagactgcttctatgaaaggaagaccatctcctttgaatgttgcatgacacaactgtttacagtccacttcttcactggggcagaagtgattgtcttggcatccatggcctatgaccgctatgtggccatttgcaagcctcttcactactcttccatcatgacccagaggctctgtggaattttagttgtggtatcttgggcaggaggtttcttgcattctatcatacaaatcatcttcactttgcagctgcctttatgtggacccaatgtcattgatcattacatgtgtgacttgttcccattactgaagcttgcctgcacagacacacacatttatgtccttttgatatttgccaacagtggtgctatatgcattataatcttctccttattgattgtctcctatggtgtcatcttgttttctctgagagcccagagttctgaagggcgacgtaaagctctctccacctgtgggtcccatataactgttgtacttttgttttttgtcccatgcatattaatatatgcaagacctacttctgcattctcctttgagaaaaatatgcttatatttgtcaatgtcctgacaccactgctcaatcctatggtttacactttcaggaataaggaaatgataaatgcaatcaagaaaatatggaaaagattttag

SEQ ID NO: 229 - DNA, 936 bp, Mus musculus
  MOR233-5
atggaaaaccagagcattgtcaatgagttcatactcttggggctttctcagaatcccaaaattgagaatatactctttgtggtatttctgttggtatacctagcaacaatcggaggcaacatgatgattatagcaaccatcatctacagccctgcattgctgggttctcccatgtacttcttcttgatattcctgtccttattggatacttgcacttctactgttgtcacacccaagcttattttagatttcttctatgagaggaagaccatctcctttgaaggctgcatgacacaactgtttgcttttcacttcttcactggtgcagaggtcattgtcttggcagccatggcctatgaccggtatgtggccatttgcaaaccccttcactactcctccatcatgacctggagactctgtggtgttttggtgggggtagcctggacagggggattcttacattctattatacaaattatctttactttgcagctaccgttctgtggacccaatgttattgataactatatttgtgacttattcccattactcaagcttgcttgcactgatacacacatttttgtctttttggtctttgcaaatagtggctctatctgcatcattattttctccttactgcttgtctcctatggtgtcatcttgttctctctgagaggccatagttccgaaggacgacttaaagctctttccacctgtggatcccatattacagttgttgttttgttctttgtcccatgtatattaatatatgcacgaactacatcaccattcccatatgagaaatatgtggctatatttgtcaatgtcataacaccactgctcaatcctatggtttacactttcaggaataaggaaatgaagaatgccatccgaaaaatgtgcagaagatctaaagtggtttctgataactattaa

SEQ ID NO: 230 - DNA, 936 bp, Mus musculus
  MOR233-6
atgcaaaaccagagctttgtcactgagttcatactcctgggactttcacagaacctgtatgtggagaaaatactatttgttttatttttgctgatctaccttgcaactattgggggcaacatgattattgtggtgaccatcatctacagccctgcactgctgggctcccccatgtacttcttcttgatattcctgtccttactggatgcattaacttcttctactgtcaccccaaagataattgtagactgcttctatgaaaggaagaccatctcctttgaatgttgcatgacacaactgtttacagtccacttcttcactggggcagaagtgattgtcttggcatccatggcctatgaccgctatgtggccatttgcaaaccccttcactactcttccatcatgactcggaggctctgtggaattttggtagtggtgtcttgggcaggaggcttcttgcattctatcatacaaatcatcttcacattgcagctgcctttctgtggccccaatgtcattgatcattacatgtgtgacttgttcccattactgaagcttgcctgcacagacacacacatttatgtccttttgatatttgccaacagtggtgctatatgcattataatcttctccttattgcttgtctcttatggtatcatcttgttctctctgagagcccacagttctgaaggtcggcgtaaagctctctccacctgtgggtcccatataattgttgtgcttttgtgctttgtcccatgcctattaatatatgcaagacctacttctgcattctcctttgagaaaaacatgcttatatttatcaatgtccttacaccattgctaaatcctatggtttacactttcaggaataaggaaatgaagaatgctatcagaaaaatgtggaagagattaatagtggtttctgataaattttaa

SEQ ID NO: 231 - DNA, 936 bp, Mus musculus
  MOR233-7
atgcaaaaccagacccttgtcactgagttcttacttctgggactttcacagaatccaaaggttcagaaaatagtatttgttgtatttttgttcatctacattgcaacagttgggggcaacatgataattgtggtaaccatcatatgtagtcgtgcacttctgggctcccccatgtacttcttcttggcatgcctgtcctttctggatgcatgcatttcctctgtcatcacaccaaaggtaactgtggacttgctttatgagaagagaaccatttcttttgaaggttgcatggcacaagtctttgctgtgcacttctttactggggtagaggtgattgtcttgatatccatggcctatgaccgctatgtggccatttgtaagcccttgtactactcttccattatgaacaggaggctctgtggaattctgatggggatggcctggacaggaggcttcttgcattctaccatacaaattatcttcattttgtgtctgcccttttgtggccccaatgtgattgatcattttttgtgtgacttgttcccattactgaagcttgcctgcactgacacacatatttttgtcattttggtgtttgctaacagtgggtctttctgcatcattattttttccttgttgcttatttcctatggtgtcattttgttctctttgagaacccacagtacagaagggagacgtaaagctctctctacctgtgggtcccacattactgttgtggttttgttctttgtgccatgtataataatatatgcaaggcctacatctgcctttttttctgaaaaaaacatgtttttatttgctactatcctgacaccattgctaaatcctatgatttacactttcaggaataaggaaatgaagaatgccataaggaaaatttggaagaaattgatattggattatggtatatcttaa

SEQ ID NO: 232 - DNA, 936 bp, Mus musculus
  MOR233-8
atgcataaccagagctatgtcaatgagttcatactcctgggactttcacaaaacccacaaattgagaaaatatcattttttatatttttattggtctaccttgcaactcttgtgggcaacatgataattgtggtgaccattgtctacagtcctgcactactgggctcccccatgtacttcttcttggcattcctgtccttcctggatgcttgtgtctcctctgttgtcacacctaagatgattgcggacatgacttatgagaggaagattatctcttttgaatgttgtatgacacaggtctttgctgtgcactttcttactgctgtagaggtcattgttctcgcagctatggcctatgaccgctatgtggccatttgcaagcccttgcactactctttcatcatgaatcggaggctctgtggcactctggttggggtagcctgggctggaggattcttgcattctatcatacaaattgcctttactttaaaattgcccttctgtggacccaatgttattgatcatttcatatgtgacttgtttccattgctgaagcttgcctgcactgatatacacatttttatcattttggtgtttgctaacagtgggtctatctgcataattatattctcctttttgctcatttcctatggtgttatattgttctctctgagagcccacagctcagaagggcgccgtaaggctctttctacctgtggatcccatattactgttgtagtttttttctttgttccctgtatattaatatatgcacggcccacatctgcattttcctttgagaaaaatgtttttgtgtttacagatgtcttgacaccattgctaaatcctatggtttacactttcaggaataaggaaatgataaatgccatcgggaaaatgaggaagagacttataatggttcctgataaatattaa

SEQ ID NO: 233 - DNA, 924 bp, Mus musculus
  MOR230-1
atgcagcagaacagcactgtcaccgagtttatactactaggattgacacaggatcccctgaagcagaaaatggtgtttataatcttcttagttttctatatggggactgtagtggggaatacactcattattgtgacaatcaagttcagtcgaacacttgggggtcccatgtacttcttcctgttttatttgtcctttgctgattcctgcttttcaacgtccacagccccaagactcattgtggatgccctttctaaaaagaacatcatttcctacaatgaatgcatgacacaagtctttgctctccatttatttggctgcatggaggtctttgtcctcattttcatggctgttgaccgttatgtggccatctgtaaacccttgcattacccagtcatcatgaggcggcaggtctgtgtcatcttgattatagttgcctggatagggtcttttctacattccactactcagattgttttggccttgagactgcccttctgtgggcccaatctgattgatcactattgctgtgacttacagcccttattggagcttgcctgcatggatacacacatgataaatctgctgttagtgtttaacagtggtgcaatttgctcaagcagttttttaatttttattatctcatattttgtcatcttatactctctgcgaaaccacagtgctgaagggagaaaaaaggcactctctacctgcacatctcatataatagtagttgtcttatcctttggaccctgcatattcatatatgcacggccaccaactactttttctatggacaagatggtaacagtattttttaccattggatcaccctttctcaacccgatcatctatacattaaggaatgcagaagttaaaaatgccatgaaaaaattatggcatgttaaaattatgacagaataa

SEQ ID NO: 234 - DNA, 924 bp, Mus musculus
  MOR230-2
atgcagcagaacagcactgtcactgagtttatactactaggattgacacaggatcccctgaaacagaaaatggtgtttataatcttcttagttttctatttggggactgtagtggggaatacactcattattgtgacaatcaagttcagtcggacacttgggagtcccatgtacttcttcctattttatttgtccttttctgattcctgtttttcaacatccacagccccaagactcattgtggatgccctctctaaaaagaacatcatttcctacaatgaatgcatgacacaagtctttgctctccatttatttggctgcatggatgtctttatcctcattttcatggctgttgaccgttatgtggccatctgtaaacccttgcgttactcagtcatcatgaggcggcaggtctgtgttatcttgattatagttgcctggatagggtcttttctacattccactactcagattgttttggccttgagactgcccttctgtgggcccaatctgattgaccattattgctgtgacttacagccattattgaaacttgcctgcatggatacatacatgataaatctgctgttagtgtttaacagtggtgccatttgctcaagcagttttgtaattttgattatctcatattttgtcatcttacactctctgcgaaaccatagtgcagaagggagaaaaaaggcactctctacctgcacatctcatattatagtagttatcttatcctttgtaccctgcatattcatatatgcacggccaccaactacttttcctatggacaagatggtaacagtattttataccattggaacaccatttctcaacccgatcatctatacattaaggaatgcagaagttaaaaatgccatgaaaaaattatggcatgttaaatttatcatgaaatga

SEQ ID NO: 235 - DNA, 924 bp, Mus musculus
  MOR230-3
atgcagcacaacagcactgtcacgaagtttatactactaggattgacacaggatcccctgaagcagaaaatggtgtttataatcttcttagttttctatttggggactgtagtggggaatacactcattattatgacaatcaagttcagtcgaacacttgggagtcccatgtacttcttcctgttttatttgtcctttgctgattcctgcttttcaacatccacagccccaaggctcattgtggatgccctctctaaaaagaacatcatttcctacaatgaatgcatgacacaagtctttgctctccatttatttggctgcatggagatctttgtcctcattctcatggctgttgaccgttatgtggccatctgtaaacccttacgatacccagtcatcatgagccggcaggtctgtgtcatcttgattattcttgcctggatagggtcttttatacattccactgctcagattgttttggcattgagactgcccttctgtgggcccaatttgattgaccattattgctgtgacttacagccattattgaaacttgcctgcatggatacatacatgataaatctgctattagtgtctaacagtggtgccatttgctcaagcagttttgtaattttgattatctcatattttgtcatcttacactctctgcgaaaccacagtgcagaagggagaaaaaaggcactctctacctgcacatctcatataatagttgttatcttattctttggaccctgcatattcatatatgcacgtccaccaactactttttccatggacaagatggtagcagtattttatactattggaacaccctttctcaacccgatcatctatacattaaggaatgcagaagttaaaaatgccatgaaaaaattatggcatgttaaaattatgaatgaataa

SEQ ID NO: 236 - DNA, 936 bp, Mus musculus
  MOR233-9
atgcaaaaccagagttctgttaccgagttcataatcttagggctttctcagaacccaaaaattgaaaaaatattgtttgttgtatttctattggtctacatggcaactgtagggggtaacatgattattgtggtgaccatcatctacagccctgcactgctgagctcccccatgtacttcttcttggcattcctgtccttcctggatgcttgtgtctcttctactgttacacccaagatggttgtagacttcttacatgagaagaagaccatctcctttggctgttgcatgacacaactgttttcagtccatttcttctcaggagcagaaatgattgtcctagcagccatggcctatgaccgttacgtggctatttgcaaacccttgcactattcttccatccttactcggaggctctgtagcattttagtagcaatatcctgggcagggggctttttgcatgctattgtacaagttatattcagattgcagctgcctttatgtggacccaatgttattgatcattatatgtgtgacttgtttccattgctgaagctggcctgcacggacactcatatatttgttcttttggtgtttgcaaacagtggtgctatctgcatcattatcttttccttgttgcttgtttcctatggtgtcattttgttctctctgagagcccacagttctgaaggacgaaggaaagctctttccacctgtggagcccacgttactgttgtagttttgttccttgttccatgcatattaatatatgcacgggatacatctgcattctcctatgagaaggacacccttatatttgtcaatgtcctgacaccattgctaaatcctatggtttacacttttaggaataaggaaatgataaatgccatcagaaaaatgtggaaaaggctaatagtgatttttgttagatattag

SEQ ID NO: 237 - DNA, 936 bp, Mus musculus
  MOR233-10
atgcttaaccagagctttgtcactgagttcatacttctgggactttcacagaacccaaaagtggagaaaatactgtttgttttgtttttcttggtctaccttgcaactattggaggcaacatagtaattgtggtaacaatcttattcagtcctgcactttttggctcccccatgtacttctttttgtctttcctttcattcctggatgcatgcatttcttctgtaatcacaccaaagatgattgtagacttcttctatgaaacgaagaccatctcctttgaatgttgtatggtacaactttttgctgtccacttcttcactggggtggaagtgattgtcctgtcagccatggcctatgaccgctatgtggctatttgcaagcccttgcactactcttccatcatgaaccagagactctgtgtcattctggtagggatagcctgggcaggaggcttcttgcattctatcacacaaattatcttcactttgcagctgcccttctgtggccccaatgttattgagcatttcatatgtgacttgttcccattactaaagctagcctgcaccaatacacacatttttgttattttggtgtttgccaacagtggttctatctgcatcattattttttccttattgcttgtttcctatggtgtcatcttattctctctgagatctcacagttctgaagggtggagtaaagctctatctacctgtggatcccacattactgttgtgcttttgttctttgtcccttgcatattaatatatgcacgaaatacttctgcattctcatttgagaaaaatgtgtttatatttgctgatgtactgacaccattactaaatcctatggtatacactttcaggaataaggaaatgaagaatgccatcaaaaaaatatggaggagattgtttaatatttctgataagcattaa

SEQ ID NO: 238 - DNA, 936 bp, Mus musculus
  MOR233-11
atgaacaaccagagctgtgtcactgagttcatattcctgggactttcacagaactcaaaagttgagaaaatactgttttttatatttttgttgatctatcttgcaactattgggggcaacatgattattgtggtgaccatcatctacagccctgcactgctgggctccccaatgtacttcttcttgatattcctgtccttactggatgcttgcacttcttccactgtcacccccaagatgattgtagacttcttctatgataggaagaccatctcctttgaatgttgcatgacacaactgtttgctgtgcacttcttcactgggatggaggtgatagtactgtcagccatggcttatgaccgctatgtggccatttgcaagcctcttcactactcttccatcatgaaccggaggctctgtggcaatcttgtgatggtgtcctgggcaggaggctttttgcattctatcatacaaattatattcatgttgcagctgcccttctgtggacccaatgtcattgatcattacatgtgtgacttgttcccattactgaagcttgcctgcactgacacctatatatttgtcattttggtgtttgccaacagtgggtctatctgcatcataatcttctctattttgcttgtctcctatggtgtcatcttgtactctctgaaagcccacagctctgaagggaaatttaaagccctctcaacctgtggatcccatattattgttgtggttttgttttttgtcccatgcatattaacatatgcacgacctatatctgcattttcctttgagaaaaatgctgttgtatttaccacagtgttgaccccattgctcaattctgtagtttatactttcaggaataaggaaatgaagaatgccatcaggaaaatgtggaagaaactgattgcagtttctgataaacactaa

SEQ ID NO: 239 - DNA, 960 bp, Mus musculus
  MOR218-1
atgactgcaagaaacatgacaacaatgagtggattcctcctcatggggttctctgacaaccatgaattgcagatcttacaggctttgctgtttttgctgacatacctattgggctcagcagggaacttcatcattatcaccatcacaacactggacccacagctccagtctccaatgtattattttctgaagcaactttccactctggacctctcatccctctctgtcacagttcctcagtatgttgccagttccctggcacgaagtggctacatttcatatgggcaatgcatgctgcagatatttttcttcacaggtttggcctggagtgaaatggccactctcacagtgatgtcttatgatcgctatgtggccatctgcctcccactgcactatgaggtcataatgagtcccagaaagtgcacttgggctgtggcagctgtgtggctaagtggaggtatctcaggaacattattcacagcaagtacactctctatcagattctgtggggataaaattattcaccagttcttctgtgatatcccgcaattgctcaagctctcctgctctaatgattactttggagtactggaagtgtctactttcatgtctgtaatggcctttgcctgctttgtggggattgccttctcctatggccagatattctctacagttctcaggatgccctctgctgaaggccgatctaaggtcttctccacctgcctgccccatctcttcgttgtttcattttttctctcaacaggcatttgtgcctatctaaagccaacctcagactcaccaactgctttagacctcatgctctctatcttttacacactactacccccaaccctcaaccctgttatctatagtctgagaaatgaatccttgaaaagagcactaaagaagttactgctaagtgaagaattcattaggaaaaaatgtttgttctatttttag

SEQ ID NO: 240 - DNA, 948 bp, Mus musculus
  MOR248-3
atgagtaaaatggatggaggtaatcactccttggtatcagaatttgtgcttttgggacttgcccactcacagaatattcaagcattactcttcatgatatttttgatgctttatctgctcattgtatcaggaaatattgtcatcatggtcttaataaccactgacccccatcttcattcacctatgtactttttgttggccaacctatcctttgttgatatgtggctttcctcagtaactactcctaagatgatcacagactttttcagggaaaacaagaccatttccttttcaggctgcatgtcccaggtcttctttgctcattgcattgctgcaggagagatggtgctgttggtagtaatggcatatgaccgttatgtggccatctgcaagccactccactacttcaccatcatgaacctgaaaagatgcactgggttggtgttgacttcctggaccattggctttgtgcatgccttgagtcacctggtagtgattgtggaactgcctttttgtagcgccaaggaaatcgatagtttcttctgtgacatgcctctggtaatcaagctagcctgtatggattctcataatttggatattttaatgtatgctgactgtggagttgtaggtgtaacctgctttattctgctgctcatatcctacacatatatccttatcactgttcgaaggagctctaaggctggggcatctaaggccctgtccacgtgcactgcccacatcaccgtggtgatgatcttttttgtgccctgcatcttcatctatgtttggcccctcaacatcacctggctggacaaatttcttgctgtattttactctgtttttacacctctcttaaatccagccatttatacactgagaaataaagagatgaaaaatgctatgagacggttcataaacaactacatggattcccaagggaagtcctaa

SEQ ID NO: 241 - DNA, 939 bp, Mus musculus
  MOR248-4
atggatggagacaatcagactgttgtgtcagaatttgtactcttgggactttcgaactctaagaatcttcaagtcttactctttctcatcttcctattgctttatctgctcatcatgtctggaaatattgtcatccaaatcttaataacaactgacccccatctgcattctcccatgtacttcttgttggccaacctgtcctttgttgatatgttgctctcctcaaacacaactcctaggatgatcatagattttttcagggaaaagaagaccatttcctttgcaggatgcatgtcccagatctttttttcccactgcattgcttcaggagaggtggtattgttggctttaatggcctatgaccgctatgtggccatctgcaaaccactccattacttcaccatcatgaacttgaagaggtgcactgggttggtgttgacttcttggacaattggctttttacatggtataagtcacgtggtagtgcttttgcagcttcctttctgtggtcccaacaaaatagacagtttcttttgtgacatgcccctggtaatcaagctagcctgcatggattcccaggatttaaatactttaatgaatggtgaatgtggtattttggctgtaacctgttttatactgttgcttatttcctacacatatatccttatcactgttcatcagaattcgaaaactggagcttccaaggctctgtccacatgcactgcacacatcacagtggtaatgatcttctttttgccctgtttcttcatctatgtgtttcccctaaatatcacctggttggacaaatttcttgctgtgttttattctgttattacacctctcctaaacccagtcatttatacactgagaaataaagagatgaaaaatgctatgaaaagattcattggcaaatttctgagagccaaaggaaattcctaa

SEQ ID NO: 242 - DNA, 939 bp, Mus musculus
  MOR248-5
atggatggaagtaatcgctccctggtatcagaatttgtgcttttgggacttgcccgctcacagaatcttcaggtcttactcttcataatatttttggtggtttatctgctcattctatctggaaatactattgtcatgttcttaatcatcactgacaagaatctccattctcccatgtacttctttttggccaacctgtcctttgttgatatgtggctttcctcagccaccactcctaagatgatcacagattttctcaaagaaccaaagatcatttcctttgcaggctgcatgtcccaggtcttctttgaccattgtgttggtgcagtagagatgttgctgttggtggtaatggcttatgaccgctatgtggccatctgcaaaccacttcactatttcactattatgagcctgaaaagatgtgctgggttggtgttaacttcctgggcaattgcctttgtgcatgccatgagtcagcttttggcagttgtgcaactgcctctctgtggtcatatggaaattgacagtttcttctgtgacataccacttataatcaagctagcttgcatggattcccatattttggatatttatatgaatgtcgactgtgggtttgtggttgtaacctgctttattctgttgctcatatcttacacatatatccttctcactgttcgccagagctctaaagctggggcatctaaggctctgtcaacatgcactgctcacatcacagtagtgatgatcttttttgtgccctgcatcttcatctatgtgtggcccctcagtatcacctggttagacaaatttcttgctgtgttttatactgtttttgcacctctcctaaatccagccatttatacactaagaaataaagagatgagaaatgctgtaaagaagttaaaaaaccattttatggattataagggaaatacttaa

SEQ ID NO: 243 - DNA, 939 bp, Mus musculus
  MOR248-6
atggatagagacaatcagactgttttgtcagaatttgtactcttaggactttccaactccaagaatcttcaagtcttactctttctaatcttcttattgctttatctgctcatcatgtctggaaatattatcatccaaatcttaatcaccactgacccccatctgcattctcccatgtacttcttgttggcaaacctatcctttgttgacatgtggctctcctcaaacaccactcctaagatgatcatagattttctcagcgaaaacaagaccatttcctttgcaggatgcatgtctcaggtctttttatcccattgtattgctggaggagagatggtattgttggtggtaatggcttatgaccgctatgtggccatctgcaaaccactccactacttcaccatcatgaacttgaagaggtgcactgggttggtgttgacttcttggacaattggattcatacatggtataagctactttttagtggttgtgcagcttcctttctgtggtcccaacaaaatagatagtttcttttgtgacatgccactggtaattaagctagcctgcatggattcccatgatttaaatactttaatgaatgctgaatgtggagttgtggctgtaacctgctttatgctgttacttttttcctacacatatatcctcatcactgttcgccagacttcaaaaaatggagcttctaaggctctgtccacatgcactgcacacatcacagtggtaatgatcttctttttgccctgcatgtttatctatgtgtggcccctcagtatcacctggttggacaagtttcttgctgtattttattctgtttttacacctctcctaaacccagccatttatacactgagaaataaagagatgaaaaatgctatgaaaagattcattggcaaatttctgtgtcccaaaggaaattcctaa

SEQ ID NO: 244 - DNA, 939 bp, Mus musculus
  MOR248-7
atggatggagacaatcagactgttgtgtcagaatttatactctggggacttgcccattcaaagaatattcaggtcttgctatttgtgatatttctgatgctttatcttctcatcatgtctggaaatattgtcatcctgaccttaataaccactgacacccatctgcattcccccatgtacttcttgctggccaacctgtcttttgttgacatgtggctctccacaaacaccactcctaagatgatcacagattttctcagggaaatcaagatcatttcctttgcaggatgtatgtcccaggtcttcttttcccattgcattgctgcaggagaaatggtgctgttggtggcaatggcttatgaccggtatgtggccatctgcaagccactccattacttcaccatcatgaaccttaagagatgcagcagtttggtgttgacttcctggacaattggctttatacatggtataatttacatagtagtgattgtgcatctgcccttttgtggtcccaatgaaatagacagtttcttctgtgacatgccactggtaataaaacttgcatgcatggattatcattatttaaataccttaatgaatgctgactgtggacttgtggctataacttgctttattctgttgcttacttcctacacatatattcttatgactgtatgtaagagctctaaagctggtgcatctaaggcaatgaacacttgcactgcccacattacagtcgtgctaatcttttttgtgccctgcatctttatttatgtgtggcctctcaatatcacctggttggacaaattttttgcagtgttttactctgtttttacacccctcctaaatccagccatttatacactgagaaataaagagatgaaaaatgctatgaaaaggttcataggcaactttctgggtcccaaagtaaatttgtaa

SEQ ID NO: 245 - DNA, 927 bp, Mus musculus
  MOR248-8
atgagtccacggtgtcagaatttgtgcttttgggactttcccgctcacagaatcttcaggtacttgctctttgtgatatttttgatactttatctgctcattatttcaggaaacattgtcatcatgatcttaataaccattgaccgccatctccattcccctatgtacttcttgttggccaacctgtcctttgttgatatatggctttcctcagttaccacaccaaaaatggtcatagactttctcagggaacacaaaaccatttcctttgaaggatgtatgtcccaggtcttctttgctcattgcattgctgcaggagagatggtgctgttgctggtaatggcatatgaccgctatgtggccatctgtaaacctctccactatttcacaatcatgaacctgaaaagatgcactggattggtgttgacttcctggaccgttggctttgtgcatgccttgagccagcttgtagcagttctgcagctacctctctgtggcccattggaaatagacagttttttctgtgacatgccactagtaatcaaactagcctgcacagattcccatgatttggacattttaatgaatgctgactgtgggattgtagttgtatcttgctttattatgttgctcatatcctacacatatatccttatcactgttcgcaggagctctaaggctggggcatctaaggccctgtccacgtgcactgcccacatcactgtggtgatgctgctgtttttgccctgcatcttcatctatgtttggcccctcaacatcacctggttggacaaatttcttgctgtgttttattctgttgttacacctctcctaaatccagccatttatacactgagaaataaagaaataaaaaatgctctaaagagatttaaaagctatgttatgaatcacaaggtaaatacttaa

SEQ ID NO: 246 - DNA, 930 bp, Mus musculus
  MOR171-2
atgactgcagagaatcaatctacagtgacagagtttatcctcggggggctaactaacaggccagagctccagctacccctcttcctcctctttctggggatctacgtagtcaccatggtaggaaacctgggcatgatcaccttgattggactcaactcacagcttcacacccccatgtacttcttcctcagtaacctgtcactcgtggatctctgctactcctctgtcattacccctaaaatgctcatcaactttgtgtcccaaagaaacctcatctcctatgtgggatgcatgtctcagctatacttcttcctggttttcgtcattgctgagtgttacatgctcactgtgatggcctatgaccgctatgtggccatctgtcaacccttgctttataacatcatcatgtctcctgccctctgctctctgctggtggcttttgtctatgccgtaggactcatcggttcagcaattgagactggcctcatgttgaaattaaactattgtgaggacctcatcagccactacttctgtgacatcctccccctcatgaagctctcttgctctagtacctatgatgtagaaatggctgtcttctttttagctggatttgacattatcgtcacaagcttaaccgtactcatttcctatgcattcatcctgtccagcatccttcgcatcagctccaatgagggcaggtccaaagccttcagcacctgcagctcccactttgcagctgtgggcttgttctatggatccacagcattcatgtacttaaagccttctacagctagttccctggcccaggagaatgtagcttctgtgttctacaccacagtgatccccatgttcaaccccctgatctacagcctgagaaacaaggaggtgaagaccgcactggacaaaacactgaggagaaaagtcttttga

SEQ ID NO: 247 - DNA, 930 bp, Mus musculus
  MOR171-3
atggctgcagagaatcaatctacagtgacagagtttatcctcagagggctaactaacaggccagagctccagctacccctcttgctcctcttcctggggatctacataatcaccatggtgggaaatctgggcatgatcaccttgattggactcaactcacagcttcacacccccatgtacttcttcctcagtaacctgtcactcgtggatctctgctactcctctgtcattacccctaaaatgctcatcaactttgtgtcccaaagaaacctcatctcctatgtggggtgcatgtctcagctatacttcttcctggttttcgtcattgctgagtgttacatgctcactgtgatggcctatgaccgctatgtggccatctgtcaacccttgctttataacatcatcatgtctcctgccctctgctctctgctggtggtttttgtctatgccatgggactcataggctcaacaatagagactagcctcatgttgaaattaaactattgtgaggacctcatcagccactacttctgtgacatcctccccctcatgaagctctcttgctctagtacctatgatatagaaatggctgtcttctttttagctgggttcaacattatagttaccagcttaaccgtactcatttcctatgcattcatcctgtccagcatccttcgcatcagctccaatgagggcaggtccaaagccttcagcacctgcagctcccactttgcagctgtgggcttgttctatggatccacagcattcatgtacttaaagccttctacagctagttccctggcccaggagaatgtagcttctgtgttctacaccacagtgatccccatgctcaaccccctgatctacagcctgagaaacaaggaggtgaagaccgcactggacaaaacactgaggagaagagtcttttga

SEQ ID NO: 248 - DNA, 933 bp, Mus musculus
  MOR161-1
atgactgccaagaattcctctgtgacagagttcatccttgcaggcctgacagaccagccaggactccgcatgcccctcttcttcctgtttctaggtttctacatggtgactgtggtggggaacctgggtttgatctccctgattgggctgaactctcaccttcatacccctatgtacttctttctcttcaatctttccttaatcgatttctgctattcctctactatctccccaaaaatgctgatgagttttatctcaaagaagaacatcatctcacatccagggtgcatggcacagttgtttttcttctgtttttttgttatctctgagtcttttattctgtcagccatggcatatgaccgttatgttgccatctgtaaccccctgatgtacatggtcaccatgtctccccaggtttgtttactccttttgtttggtgtatatttaatgggttttgttggagccatggcccacaccatatccatggcaaggctgaccttctgtgctgacaacattgtcaaccactatatgtgtgatatccttccccttctggagcactcctgtactagcacctatgtgaatgaactggtagtctttatttttgtgagttttgatattggtgtgcccattgtcaccatcttcatttcttatgccctcatcctctctagcattcttcacatgcattccacagagggcaggtccaaggccttcagcacctgcagctcccacatgattgtggtttgtcttttctttggttctggggctttcatgtatctccagccaccttctgttttgtcccttgaccaaggaaaggtgtcttccttgttctatacgattgtagtacctatgttgaatcctctgatctatagcttgagaaataaggatgtcaaagttgctgtaaggaaaaccttggacaggagaatattttcttga

SEQ ID NO: 249 - DNA, 933 bp, Mus musculus
  MOR161-2
atgactgccaagaattcctctgtgatagagttcatcctcgcaggcctgacagaccaaccaggactccgcatgcccctcttcttcttgtttctaggtttctacatggtgactgtggttgggaacctgggtttgatctccctgattgggctgaactctcaccttcatacccctatgtacttctttctcttcaatctttctgtaatagatttctgttattcctccactatcatcccaaaaatgcttatgaattttatctcaaggaagaacatcatctcacactcagggtgcatgacacagttgtttttcttctgtttctttgttgtctctgagtccttcatcctgtcagccatggcatatgaccgttatgttgccatctgtaaccccctgatgtacacagtcaccatgtctcctcaggtatatttacttcttttgctgggagtctatgtgatgggcttctctggggccatggcccatacagggaacctcatgaatctgaccttctgtgctgacaacctcatcaatcacttcatgtgtgatattcttccccttcttgagctctcctgcaatagcaccttcataaatgagctcgtaatctttattgttgtggcctttgatattggtgtgcccattgtcaccatcttcatttcttatgccctcatcctctctagcattcttcgcatgcattccacagagggcaggtccaaggctttcagcacctacagctcccacttgattgtggtttgtcttttctttggttctggggctttcatgtacctcaaacctccttccattttgcctcttgaccaaggaaaagtgtcttccttgttctatatgattgtggtgcccatgttgaaccctctgatctatagcttgagaaataaggatgtcaaagttgctctgaggaaaaccttgggtaagagaattctttcttaa

SEQ ID NO: 250 - DNA, 942 bp, Mus musculus
  MOR267-2
atgctaaagtcaaacacaacctttgtaacagagttcctgtttgaaggtttctccggctttggttggcagcacaggcttgccttttttgctattttcctagcattgtattttctcactctgtctggcaatgtgattattgtgagtattattcacctggatcatcatctacatactcccatgtacttctttctggccatattgtctatctctgatacctgctataccgtgactattataccacgcatgctttctgacctcctcaatccttaccacacgattgcttttcgagactgtgtggtccagatctttttttatctaacttttggcatcaacaactgtttcttactcatggtcatgggatatgaccgttatgtggccatttgcaaccccctaaggtattcagtcatcatgggtaggaaggcttgtgtccacttagcatctgggtcactgggaattggcctaggcatggctatagtccaagttacatcagtatttagcttgcccttctgtgatagatttgttatcccccacttcttctgtgatgtgagacccctgctgaagctggcctgcacagacaccactatcaatgagatcatcaactttgtagtcagcgtgtttgttcttattctaccaatgggtgtggtcttcatctcctatgtagtgatcatctccaccatcctcaagattgcctctgctgagggacggaagaaggcctttgccacctgtgcctcccacctcacggtggtcatcatccactatggctgcactgcaatcatctacatgaaacctaagtcccagagcttgctggggcaggaaagactcatctcagtgacctacactcttatcacccctctactgaatcctttggtatacactctgcggaataaggaggtcaaagatgccctacgcagagccatgtggcagaagccactttcatcttaa

SEQ ID NO: 251 - DNA, 942 bp, Mus musculus
  MOR267-3
atgccaaagaaaaactccacagttgtggccgagttcctctttgaaggtttctccagctttgattggcagcacaggcttggcttctttattgtgttcctaacgctgtaccttctgactctgtctggcaacatgatcattgtgacaattattcgtctggaccgccatctccatacacccatgtacttttttctaagcatgctctccatctctgagactttctataccattgccattattccacgaatgctagctggcctccttaatccttaccaggccatagatattcaaggttgtgcaacacagctcttcttttatctaacttttggcatcaacaactgttttctcctcacagcaatgggttatgaccgctatgtggccatctgcaatcctctaaggtattcggtcatcatgggtaagaaggcctgtatcctcttagcatctgggtccctgggaattggcctgagcatggctattgtccaggttacatcagtgtttggcctaccattctgtgatgggtttgttattgcccacttcttctgtgatgtgagacccctgctgaaactggcctgcacagataccactatcaatgagataatcaactttattgtcagcgtgtgtgtccttgtgttacccatgggtcttgtcttcatctcctatgttgttatcatctctaccatccttaagattgcctcagctgaaggccggaagaaggcctttgccacctgtgcctcccaccttactgtggtcatcatccactatggctgtgcctcaataatctacctaaaaccaaagtcccagacttccctagggcaggacaggctcatctcagtgacttacactgtcatcacccctctactgaacccagtggtatacagtttgagaaacaaagaggtcaaagaggctctacgaaaggccataggacgtaggcctctttcctcttaa

SEQ ID NO: 252 - DNA, 948 bp, Mus musculus
  MOR275-1
atggacctcaccacctggatgaacaactacactacacagtcagatttcaccctggtgggattcttcagtcaatccaaacactctgccctgcttgctgtggtcatatttgtggttttcctgatggccttgtctgggaacgccctcctgatcctgctggtactctctgacacccacctccacacacccatgtacttttttatcagccaactgtccctcatggacatgatgtacatttctgtcactgtgcccaagatgctcatggaccaggtcctggggagccacaagatctcagctgctgcctgtgggatgcagatgttcctctatgtgacactagcaggttcagaatttttccttctggctgccatgtcctacgaccgctatgtggccatctgccatccactccggtatcctgtcctcatgaactacagggtttgtctcctcctgatgtctgtctgttggatcctgggatctttggatggcttcatgttcacccctgtcaccatgaccttcccattctgtggatcccgggagatccatcacttcttctgtgaggttcctgctgtgacaaagctctcctgctcagacacctggctctatgagaccctcatgtatgtgtgctgtgtgctcatgcttctcatccctgtgacagtcatttcaggctcctatacatccatcctcctcactgttctcaggatgaactcagcagagggcaggaagaaggcccttgccacctgctcctcccacatgactgtggtcaccctcttctatggtgctgctatctatacctacattttccctgcctctctccacacccctgagaaggacatggtggtgtctgtgttttacaccatactcacccctctgttgaacccactaatctatagttttaggaataagaatgtcacagaggctatgaagaaactgttagttgtgagcaccctcttctga

SEQ ID NO: 253 - DNA, 948 bp, Mus musculus
  MOR281-1
atgggcagcgagcactggaactactccaccgctggctttgtgctgacgagcctttttaacaacagccagacacacctgttcctgttcagcatggtgatgttggtctacatccttgctatggcgggcaacacggccatggtccttctgatttggatggacacccgactccacacccccatgtacttcctcctcagccagctgtccttcctggacatcttctttacatctgtcactgtccccaagatgatagtaggctttctctttggttggacgagcatctctttcggaggttgtggggcacagatgtttttcttcatgttcttgggggctgcagagtgcctcctgctggccctcatggcttatgaccgttacgtggctatctgcaatcctctgcgatacccagtgctcatgagccgccgggtgtgcctgctcatggtcgtggcctcctggttgggagggtccctcaacgcctccattcagacttctctgacccttcagttcccctactgtggatcacggaagatctcccacttcttctgtgaggtgccctcgctgctgatgctggcctgtgcagacacagaagcctacaagcaggtactatttgtgacgggcgtggtggtcctcctggtgcctattaccttcattacagcctcctatgccctcatcctggctgctgtgctccggatgcactctgtggaggggcgtcagaaggccctggccacatgctcctcccacctgacagtcgtcaatctcttctatgggccccttgtctacacctacatgttacctgcttcctatcactcgccgggccaagacgatgtagtatctgtcttttacacggttctcacgcccatgctgaaccccgtcatctacagcctcaggaacaaggaagttacaggagccatgaagaaagcaatgaggaggtgtggcgtcaatagaaatgcctga

SEQ ID NO: 254 - DNA, 954 bp, Mus musculus
  MOR277-1
atggcctgggcaggcaaccagactctcatctctcactttgtcctcctgggcctcttcacccactctccactgcatctcttcctcttctccatcattatggtcatgttcctggtggccctctctggcaatgggctcatgatcctcctcatccttatggactctcgcctgcacaccccgatgtacttcttcctcagttggctgtccctcatggacctcatgctcatctccaccattgtgccacggatggctgctgactttctcctgggccgtggctccatctccttcgctggctgtgggctccagattctcttcttcctcaccctcctgggggatgagtgcttcctgctagccttcatggcctatgaccgctatgtggccattagcaacccgctgagatactctgtaatcatgagccgccgtgtctgctggctcatggtagcggggtcttggctctttggcctggtagatgggctgatccaggctgtttttacacttcgcttcccctactgcggttcccaggagatcgaccacttcttctgtgaggttcctgctgtgctcaagctggcctgtgctgacaccagtctctacgagaccatgatctatgtctgctgtgtcctcatgcttctcctgcccttttctgtcatctcggcttcctacctcaggatcctggtggcagtgctccggatgcgctctgcagaagggcggcggaaggccttcgctacctgttcctcccacatgatcgtggtctccctcttctacggggctgccatgatcacatacatgaggccacaggcctaccactcctccaagcaggacaaagtggtctctgctttctacaccatgatcacgcccatgctcaaccctcttatttacagtctaaggaacaaagaagtgaccggagccctgaggaaactactgggaaagtgtccctgtggtggtgggactcttggttga

SEQ ID NO: 255 - DNA, 948 bp, Mus musculus
  MOR276-1
atgggaatatggctgaacgaatcgtctgtagatgggttcatcctcctaggcatcttctcccagagccagactgaccttctcctcttctccacagttatgctggtcttcaccgtggcgctctgtggaaatgtcctcctcatcctactcatctacactgacccccgactccacacccccatgtacttcttcctcagtcagctctccctcatggacctcatgctggtctgtaacattgtgccaaagatggcagtcaacttcctgtctggcaggaagtccatctcttttgccggctgtggcatacaaatcggattttttgtctctcttgtgggatcagagggtctcttgttaggactcatggcttatgatcgctatgtggccattagccacccacttcactatcccattctcatgagccaaaaggtctgtctccagattgctggaagttcctgggcttttgggatccttgatggaataattcagatggtggcagccatgagcctgccctactgtggctcacggtatatagatcacttcttctgtgaagtgccggctttactgaagctggcctgtgcagacacctcccttttcgacaccctgctctttgcttgctgtgtctttatgctgcttcttcctttctcgatcattgtgacttcctatgctcgcatcttgggggctgtgctccgtatgcactctgcccagtcccgaaaaaaggccctggccacttgttcctcccacctgacagctgtctctctcttctacggggcagcaatgttcatctacctgaggccaaggcgatatcgcgctcctagccatgacaaagttgtctcaatcttctacacagttcttactcctatgctcaaccccctcatttatagcttgaggaacagggaggtgatgggggcactgaggaaaggactggaccgctgcagggttggcagccaacattga

SEQ ID NO: 256 - DNA, 951 bp, Mus musculus
  MOR170-1
atgccactcaatgcacaaaagactatggaaaatgattcttctgtgtctgagtttattcttatgggactgacagaccaacctgagctccagctgcccttatttgttctgttcttggtgaactacacagtcactgtgatgggaaatttgagcttaatgaatctcatttgcctaaactcaaaccttcacacccccatgtactttttcatcttcaacctgtccttcattgacttctgttattcaatggtctttacccccaaaatgctgatgggctttgttgtagagaagaacatcatctccttcagaggatgcatgactcagctgtttttcttcctattttttgtgaactctgagagttatgtgctgacagcaatggcctatgatcgctatgtggccatctgtcagccactgctctacaaagctgttatgtcacctggcatctgctttctattgatattttgtacttatttgatggggcttgttagtgccttattccatacaggttttatgataaggctcaacttttgtgattctaatgttatcaaccactatatgtgtgatatcttccctctctttcggctctcctgcagtagcacctatctcactgagcttgtgagctctgctgtggtgggtacagctattatcttatgttgcctcattatcttaatctcttatggtatgatcctttacaatatcattcatatgtcatcaggtaagggttggtccaaagccttgggcacttgtggttctcacattataactgttagcttgttctatgtaactgggatgcttgcttatgtcaagccatcatctgctgagactgtgggacaggggaaaattttctcagtattttacacttttttggtgcccatgctgaatcctcttatttacagcctcaggaacaaggatgtcaaacttgctgtgaaaaaaacctggaagagactcacatgttaa

SEQ ID NO: 257 - DNA, 951 bp, Mus musculus
  MOR170-2
atgcaagtcatgaagcaaatgattacagaaagtaattcttcagtgactgagttcattcttatgggattaacagttcaaaaagagctccagttgcctctttttgtcctattcttgttaaactacacagccactgtggtaggaaacctgagcttaatgaatctcatttgcctaaattcacatcttcacactcccatgtactttttcatcttcaatctgtcctgcattgatttttgttattcatttgtttgtaaccccacaatgctgacaagttttgtttcagagcagaacaccatatcctatgaaggatgcatgactcaactatttttcttctgtttttttgtaaactctgaatgttacgtgctgacagccatggcctatgatcgctatgtggccatctgtcatcccctccagtatacaactgtcatgtctcctaagatctgctgtctgctggtgtttggttcttacttgatgggttttgctggtgccctgactcatacagggtttatgatcaggctcaggttttgtaattcaaacatcatcaaccactacatgtgtgacatatttcccctccttcagctctcttgtactagcacctatgtcaacgagcttgtgagctctgctgtggttggaacaattatcattttatctagcatcattattttagtctcatatgctatgatcctttccaatatccttcatatgtcatcaagtaagggttggtcaaaagccctgggcacttgtgggtcccacattataactgttagcctcttttatggatctggactgcttgcctatatcaagccaacatctgctgagactgtggaccaggggaaatttttatcaatattttacactcttgtgatacccatgctgaatcctctcatttacagcctcaggaacaaggatgtcaaacttgctgtgaagagaacaatgaaaagagtcacaagctga

SEQ ID NO: 258 - DNA, 936 bp, Mus musculus
  MOR165-1
atggggctggaaaatggttctttggtgactgaattcattctactggggttaacaaatgatcctgatctccagttacccctgttcctactctttctgctaatatacacaacaacagcagtggggaatttggctttgatcactttaattgcactgaattctcaccttcacacccccatgtactttttccttttaaacttgtcctgcattgatctttgttattcatctgtaattacacccaaaatgctgatgaacttcttagtaaggaagaacattatctcctacatgggatgtatgacccagctctatttcttctgtttttttgccatttgtgaatgttgtgttctgacatcaatggcctatgatcgttatgtggccatatgcaatccactcttgtataacatcactatgtctcccaaggtttgttcctatcttatgcttggttcatacataatgggattttctggtgccatgattcacactggatgcattctgagactgaccttctgtgacaggaacatcatcaaccactatttctgtgatcttttccctctgttgcagctctcctgtaccagcacttatgccaatgaaatagagattctaatcgtaggtggtaaagatatcattgtgcccagtgttatcatctttacctcttatggtttcattctctcaaatatccttcaaatgagatccactgcaggaatgtccaaagcatttagcacctgtagctcccatatacttgctgtttctttattctttggctcatgtgcatttatgtatcttcagccctcctcacctgggtctatggatcagggaaaagtctcttctgtcttctataccattgtggttcccatgatgaaccccttaatctatagctttaggaacaaggatgttaaaattgccctgagaaaaatctttggccaaaggagattttcataa

SEQ ID NO: 259 - DNA, 933 bp, Mus musculus
  MOR165-2
atgggtgtggagaatggttcattggtgaccgaattcattctgcagggattgacaagtgatcctgatctccagttacccctgttcttactctttctgctaatatacacaacaacagcactggggaatttgtccttgatcactttaattgcactgaattctcaccttcacacccccatgtactttttccttttaaacttgtctttcattgacctttgttattcatctgtaattacacccaaaatgctgatgaacttcttagtaaggaagaactttatctcctatgtaggatgtatgacccagctctatttatttgttttttttgctgttagtgaatgttgtgttctgtcatcaatggcctatgatcgttatgtggccatatgcaatccactcttgtataacattgctatgtctcccaaggtttgttcctatcttatgcttggttcatacataatgggattttctggtgccatgattcacactggatggatgcttagactgaccttctgtgacaggagcattatcaaccactatttctgtgatctactccctttgttgcagctctcctgtaccaacacctatgccaatgagattgagattattattgtaggtggaattgatatcattgttcccagtattatcatttttacttcttatggcttcgttctctctaacatcttccaaatgagatctactgacggcagatccaaagccttcagcacctgcagttcccacatagttgttgtttctttattctttggttcaggcgcattcatgtatcttcaaccctcttcacctgagtctatggatcagggaaaaaggtcttcggttttttataccatattggtgcctatgatgaatcccttaatctatagtttgaggaacaaagatgtgaaaattgccctgaaaaaaacatttagcacgcagagtgtttga

SEQ ID NO: 260 - DNA, 951 bp, Mus musculus
  MOR170-3
atgcgagtcatgaagcaaatggtttcagaaagtaactattcagtaactgagttcatttttatgggattaacagttcaacgagagttccagttgcccctgtttgttctcttcttgttaaactacacagccactgtggtgggaaacctgagcttaatgaatctcatttgcctaaattcacatcttcacactcccatgtactttttcatcttcaatctgtcctgcattgatttttgttattcgcttgtctgtaaccccacaatgttgacgagttttgtttcagagcacaacaccatctcctatgctggatgcatgagtcagctgtttttattctgcttttttgccaactctgaatgttatgtgctgacagccatggcctatgatcgctatgtggccatctgtcatcccctcaagtacacaactgtcatgtcccctaagatctgctctctgctggtgtttggttcttacttgatgggttttgctggggccatgactcacacagggtttatgatcaggctcagtttttgtaattcaaacatcatcaaccactacatgtgtgacatcttccccctccttcagctctcttgtaccagcacctatgtcaacgagcttgtaagttctgctgtggttggaacaattatcattttatctagcctcattatcttagtctcatatgctatgatcctttccaatatccttcatatgtcatcaagtaagggttggtcaaaagccctgggcacttgtgggtcccacatcataactgttagcctcttttatgggtctggtctccttgcttatgtcaagccatcatctgctgagactgtgggtcaggggaaaattttctcagtattttacactcttgtggttcccatgctaaatcctctcatttacagcctcaggaacaaggatgtcaaatttgctgtgaagagaacaatgaaaagagtcacaagctga

SEQ ID NO: 261 - DNA, 942 bp, Mus musculus
  MOR170-4
atgaaacaaatggcaacaaaaaatgactcttcagtgtctgagtttattcttatgggactgacagatcaacctgagctccagttgcccctgtttttcctgttcttgctgaaccatactgttatagtggtgggtaatttgagcttaatgagtcttattatcttaaactccaatctccacactcctatgtactttttccttttcaatctgtccttcattgatttttgttattcatttgtttttacacccaaaatgctgatgagttttgtttcagagaagaatatcatcccttttacaggatgcatgactcagctgtttttcttctgcttttttgcccattctgagagttgggtgctgacagtcatggcctatgatcgctatgtggccatttgtaagcctttactgtacaaggctatcatgttacctaggatctgttgtctgctgatgtttgtgtcatatttgatagggtttgctagtgccatggttctggcaggtttaatgattaggctcaacttttgtaataacaacatcatcaatcactacatgtgtgacatcttccctgtccttcggatctcctgcagtaacacctatctcaatgagcttgtgagtactgctgtggtgggtacagctatcattttatgtagtctgattatcttcatctcatatgctatgatccttttcaatatcattcatatgtcatcaggtaagggttggtccaaagccctgggcacttgtgggtcccacatcataactgttagtttcttctatggatctgggctccttgcttatgtcaagccatcatctgctgagactgtgggtcaaggaaaatttttctcagtattttatacatttttggtgcccatgctgaatccccttatttacagcctcaggaataaggatgtcaaagttgctgtgaagaaaaccataaagagaatcacaagttaa

SEQ ID NO: 262 - DNA, 954 bp, Mus musculus
  MOR164-1
atgataagcatgctggctggaaatggctcttctgtgacagaatttgtccttgctggtttgacagatcgtccagagctccagctgcctctcttttacctgtttctaataatctacataatcacagtggtgggaaacttgggcttgatcatcctgattggcctcaatcctcacctgcacacccccatgtactatttcctcttcaacctctccttcattgatctctgttactcttctgtcttcagccccaaaatgctgattaactttgtctctgagaagaattccatctcctatgcggggtgcatgactcaactgtttctctttctcttttttgtcatctctgaatgctacatgttgacctcaatggcctatgatcgctatgtggccatctgtaatccactgttgtataaggtcaccatgtcccctcagatctgttctgtgatatcttttgctgcgtatgggatgggatttgctggatcctctgcccacacaggctgtatgctcagactgaccttctgcaatgtcaatgtcatcaaccattacttatgtgacattcttcctctccttcaactttcctgcaccagtacctatgtcaatgaggttgtggttctcatagttgtgggtattaacatcacagttccaagcttcaccatcctcatttcctatgttttcatccttgccaacattctaaacatcaaatccacacaaggaagagcaaaagccttcagcacctgtagctctcacatcatggcaatttctcttttctttggatcagctgcatttatgtatcttaaatattcttctggatctatggaacaaggaaagatatcttcagttttctacactaatgttggtcccatgctcaaccctctgatttacagtttgaggaataaggatgtcaaggtggcattaaggaaatcattgattaagttcagagaaaagacagattttaattag

SEQ ID NO: 263 - DNA, 942 bp, Mus musculus
  MOR170-5
atgatgcaaatgactatggaaaataaatcttcagtgtcagaatttattcttatgggattgacagaccaacctgagctgcagctgcccttatttgttctgttcttgatgaactacacagctactgtaatgggcaacttgagcttaatgaatctcatttgcctaaactcaaaccttcacacccccatgtactttttcatcttcaatctgtccttcattgatttctgttattcaatggtctttaccccaaaaatgctgatgagttttgttgtagagaagaacaccatctccttcagaggatgcatgactcagctgtttttcttctgtgtttttataaatgctgagagttatgtgctgacagcaatggcctatgatcgctatgtggccatcggccagccattaatgtaccaggttgttatgtctcctaagatctgttgtctgttaatatttggttcttacttgatggggtttattagtgccacagctcacacaggatgtatggtcaggctcagattttgtgattctaacatcattaaccactatatgtgtgacatcttccctctcctccagctctcctgtagtagcacgtatgtcaatgagcttatgagttatattgcagtgggtacagctatcattttatgtagcctcattatcttagtctcatatgctatgatcctcttcaatatcattcatatttcatcaggtaagggttggtccaaagccttgggcacttgtgggtctcacatcataactgttagtcttttctatggatctgggcttcttgcttatgtcaatccatcatctgctgaaacagtgggtcaggcaaaatttttctctgtgttttacactttattggtgcccatgttgaaccctcttatttatagcctcagaaacaaggatgtcaagcttgctatgaagaaatcctggaaaagaatcacaagctga

SEQ ID NO: 264 - DNA, 945 bp, Mus musculus
  MOR256-4
atgagaaggctcaataccactccccatcacaccaatggctttattctggtaggcttctctgagtggccacgactggaaatggctcttcttgttgtcatctccatcttctatattttaacccttttggggaattcagctattatcattttgtctcgccttgatcctaaactccacactcctatgtatttcttcctggccaatctttcctttttggatctctgctataccacttctactgtcccccagatgctaaaaaatatacagagccatgagagaagcatcacctatgtgggctgcatagcacaactgttcatcttccttagcttggggtctacagagtgtgtgcttctctccgtcatggcctttgatcgctatgtggccatctgccagcctctgcgttacacagttatcatgcatccccagctgtgccaacagctggcagcagtagcctggataactggtttcagcaattccttggtgcagacagtgttgacttctttgttacctcgttgtggccaataccagatagagaatttcttctgtgaggtacctgccatgcttcagttatcatgtgttgacacctgggtcaatgaagtagagatgtatgctgctgtggttgtcataaaagttatcccccttgggctaattcttttctcttacataaacattgtcagggcagtcataaagatacaatcttctgaaggtcgaaagaaggcctttaacacatgtgggtctcatcttctggtggtcatcatgttctatggctctgccatcagtggatatgcatacatggcaccgaagagcagctcagccaaactgaagggcaagcttttggcactgttctatggactcataacgccaatgctgaaccctcttatctataccttgaggaacaaggatgtcaaggcagcagtgaagaaagtacttggaagagaacaagagtaa

SEQ ID NO: 265 - DNA, 942 bp, Mus musculus
  MOR187-3
atggggcaacagaatacaacatcactgcctgggttcatcttgatgggaatcacacagagcactgagcttcagcttcctttgtttggggtcttcttcatcatctatgcagtcacagtcatgggcaacctgggcatgatcattttgaccaagctggactctcgcctacaaacccctatgtactttttcatcagacacctggctttcattgatcttggaaattccactgtcatctgtcccaagatgctgatggattttgttatggatgaaaaaaacatttctttttatgcatgtgccacacagatgtcattctttgttttgttcattatcagtgaactctttatcttgtcctcaatggcctatgactgctatgtggccatctgcaaccctctgctctacagtgtgatcatgtctcagagactttgccatgtgcttgtggacatcccatatctctacagcaccttccaggctctgctattcaccagtaaaattttcacattaactttctgtggctctaacatcatcagccatttctactgtgatgctgtttacttgttacccaccttgtgttcaaatgctgaagaaatacaactgctgatcatattattttcagcattgaatttgctctcctctcttctgatagtccttggattatatgtcctgattctgatagccatatgtcgaatgcattctgcagaaggcagaagaaaagcgttctctacatgtgggtctcatctgacagtggttgtggtgttttatggtactctactgtttatgtacttgcaaccaaaatctactgactccttagagaatgataaaataacctctgtgttttatactttagtgatccccatgattaaccccttgatatacagtttaaggaacaaagaggtaaaaaatgctttcaacagggcattaaagaatccatttaaaattaatacttaa

SEQ ID NO: 266 - DNA, 930 bp, Mus musculus
  MOR203-1
atgaaacacagtaatgactccaaagtgactgaatttattctcctgggattcgctggtcaaaatgagtcttggcacatcctctttgtggtattcctagtcatttacatagccactttagtgggcaacattggcatgatcctgctcatcaagcttcattcttcactgcacactcccatgtactttttcctgcagcatttggcttttgttgacctctgttactcctctgccatcactcccaggacactgcaaaattttgtgagcacaaaaccatccatctccttcacaggatgcttggctcaattactggtctatggtatctttgtaaccagtgactgcttcatcctggctgctatggctgtcgaccgttatgtggccatctgtaacccactgcgctatcctattatcatgtcccagagactctgcattttgctgctgcttggttcatacactatgggattcctaaatgccactgtaaatacaggttttactttcttatctaacttctgcaaatccaatgtcattaatcattttttctgtgatgtaccaccaattctagccctctcttgttccagtattgacctcaatatcatggtactgacaatttttgttggttttaacttgacattcactgtatctgttgtcattctttcttacacatttatcttggctgccatcctaaggatgtcttcagcttcaggaaggagaaaagctttctccacgtgtgcatcccatatgaccgctgtcaccatattctatggaacactctcatacatgtatgtacttcatgggactaacagatctcaagaacaggagaaggtggcttctgtgttctatggtattatgattcccatgttaaaccccctcatctacagcctaagaaaccaggatgtgatagaagccctgaggcacataggaaacaaatgtttctag

SEQ ID NO: 267 - DNA, 936 bp, Mus musculus
  MOR114-3
atgaggaaccacactgtcacaactttcatcttactgggactgacagatgaccagcaactgcaggttcttatctttatcattctcttcttcacctactcactgagcatttctggaaatctggccatcatctccctcatcttagtggatcctcaccttaaaacagccatgtactatttccttaagaactttgctgtcttagagatctcattcacatctgcaagcatccccagatacctgtataacatagcaacaggtgacaaaatgattacctataatgcctgtgttgcccaagtattttttactgacctctttggcgtaactgaattcttccttctagctgccatgtcctatgaccgctatgtggccatctgcaggccactgcactatttgactatcatgagtaccacagtctgcagaagacttgtgttttgttcttgggtagctggtttatttattttaatccccccacttagccttggcctaaatctgcagttctgtgattccaatatcattgatcattttatctgtgatgcttctcctctccttaaaatctcttgttcagacacttggttcatggagcagacagttctcatctgtgctgtactgacactcattataacgctggtgtgtgttgtactctcctatgttaatatcatcaagacagttcttagattcccttctgcccaacaaaagaaaaaagccttctctacctgttcttcccacatgattgtggtttccattacctatggcagctgcatcttcatctacatcaagccttcagcaaaggatgaggtggccatcaacaagggtgtgacagttctcactacttccattgcccctatgctaaaccccttcatctacacacttaggaataggcaagtcaagcaagccttctgggactcaataaaaagaattatagcattttctaagcaataa

SEQ ID NO: 268 - DNA, 939 bp, Mus musculus
  MOR114-4
atgaaaaattatacagcaattactacattcatcctggtaggactaaccaatgatgcaaatcttcaaattctgcttttcatatttttgctcttaacctacttattgagcgtaattggtaacctgaccatcatcactctcacactggtggattcccaccttaagactcccatgtattttttcctcagaaatttctcccttttggaagtctcattcacaactgtctgtattcccagattcctctacacaatggcgtctggggacaataccattacctacaatgcatgtgccactcaactattttttgttattgtcctgggtgtgactgagttttttctgctgactgccatgtcctatgaccgctatgtggccatctgcaagcctctgcattacaccaccatcatgagcaacagggtctgcatccagttccttattggctgttatttaatggctttaattattgtcatcccaccttatagcataagctttaagcttgagttttgcaactccaatgtcatagatcactttggctgtgacgctgctcccatcctgaagatcagctgctccaacacagagttcatagagcggtttgtgttgatcttggctgtgctgacactcatgttcacgttactgtgtgtggtaatgtcttacacatacattatcagaaccatcctcagattcccatcagcccagcaaaggaaaaaggctttttctacttgttcttctcatataattgtggtttctatcacttacggcagctgcattttcatctatattaaaccatctgcaaaagaaggagtggctgtaaataaggttgtgtctgtgctcacgacttcggttgctccagttatgaatcctttcatctacactctgaggaataagcaagtggttcaagctttcaaagacatgatcaaaaggattgcctctatcataaagagctaa

SEQ ID NO: 269 - DNA, 936 bp, Mus musculus
  MOR114-5
atgaggaaccatacagtaacgacattcattctcctgggactaacagaggatccacaaattcaaagcctgcttttgatttttctccttcttacctacttgttgaatataactggtaacttgacaattatcttacttacattaatagatcctcaccttaaaactccaatgtactttttcttgcaaaacttttccttcttagaaatcttgttcacatcagcttgtattcctagatacttgtataatctagcaactggtgacaagaccattacctatggtgcctgtgccagtcaagcatttttcaccgacctttttggagtaactgaattttttctcctggccaccatgtcctatgaccgctatgtggccatctgcaaaccgctgcattacaccaccatcatgagcactgcctgcagaagactccttctttgctgttgggtggctggggtgatcatcatactgccaccctttagcctgagtcaaaatctgcaattctgtgattctaacatcattgatagctttctttgtgatgtgtctcccttcctgaagatttcctgctcagacacatgggtcattgagcagatggttataggatgtgccgtgctgaccttcatcacaacccttttttgtgtggttctttcctatgtgtacataatcaagaccattctaaaattcccttctgcccagcagaggaaaaaggccttttctacctgctcttcccacatgattgtggtttccatcacttatggcagctgcatcttcatctacgtcaaaccatcagcaaaggattcagtggctatcaacaagggggtaatagtactaactacctccattgctcccatgttgaacccattcatttacaccttgaggaacaagcaagtcaaacaggccttcaacgattcaatcaaaaaaattgccttagaatgccaaaatggatga

SEQ ID NO: 270 - DNA, 930 bp, Mus musculus
  MOR269-2
atgggggatgataatgatacagacataacagagtttattttactggggttctcgggttatggctttcttcagggccatctgttctggggtgtgctgtgtatctatgttgttaccttgctgggcaactctctgatcgtcctccttacgctggcggactctgcgctccactctcccatgtacttcttcctgcgtcacttctctgtggtggagatcctctacaccactaccattgtgcctcggatgttggctgacctccggtcttcctgccccaccatccctcttgccagctgcttcactcagttatatttctttgccctttttggcattgctgaatgctgcttgcttactgccatggcctatgaccggtatgctgccatctgctgtccactgcattatactaccctgatgagccagggaacctatacaggcttggtgggggcctcttatcttgcaggtgtcatctcaggcactactcactccatcttcatcttcacgttgcctttccgtggggccaaaaccatccatcacttcctgtgtgatatcctgcctgtgctgagactggctactgcaagcactttctggggtgaagtggggaacctctttgtcacaataacttttatctttgcccccttcttattgattgtggcctcttatgcctgtattcttgccaccatccttggggtggcaacatcccagggtcgtcaaaagctcttttctacgtgctcctcccacttgtttgtggtcatactcttttttgggactgggactgttgcctatatgaggcctcaggctgattcctttggggacactgaccaaattatcaccctgttctacacagttgtcacccccatgtgcaacccttttgtttacactctgaggaacaaggaggtcacaggggccatgaggcggctcgtgaagagatacttttag

SEQ ID NO: 271 - DNA, 939 bp, Mus musculus
  MOR269-3
atgggggatgataatgatacagacataacagagtttattttactggggttctcgggttatggctttcttcagggccatctgttctggggtgtgctgtgtatctatgttgttaccttgctgggcaactctctgatcgtcctccttacgctggcggactctgcgctccactcccccatgtacttcttcctgcgtcatttctctgtggtggagatcctctacaccactaccattgtgcctcggatgttggctgacctccggtcttcctgccccaccatccctcttgccagctgcttcactcagttatatttctttgccctttttggcattgctgaatgctgcttgcttactgccatggcctatgaccggtatgctgccatctgctgtccactgcattatactaccctgatgagccagggaacctatacaggcttggtgggggcctcttatcttgcaggtgtcatctcaggcactactcactccatcttcatcttcacgttgcctttccgtggggccaaaaccatccatcacttcctgtgtgatatcctgcctgtgctgagactggctactgcaagcactttctggggtgaagtggggaacctctttgtcacaataacttttatcttcgtccccttcttattgattgtggcttcttatgcctgtattcttgtcaccatccttggggtggcaacatcccagggtcgtcaaaagctcttttctacatgctcctcccacttgtttgtggtcatactcttttttgggactgcgactgttgcctatatgaggccccaggctgattcatttgggaacacagaccagattcttactttggtctacacagttgtcacccccatgtgcaacccttttgtttatagtctgcgaaacaaggaggtcacaggggccatgaggcggctcatgaagagatacctttggggtccttga

SEQ ID NO: 272 - DNA, 942 bp, Mus musculus
  MOR131-1
atgggaggcaccaaccagtccagtgtctctgagttcctccttctgggactctccaggcagccccagcagcaacagcagctcatctttctactcttcctcatcatgtacctggccactgtcttgggaaacctgctcatcatcctggccatcagcacagactcccgcctgcacacccccatgtacttcttcctcagcaacctgtcctttgtggatgtatgcttctcctccaccactgtccctaaggtactggccattcacatactaagaaatcaagccatttcgttctctgggtgcctcacacagctgtattttctctgtgtgtttgctgacatggacaatttcctgctggctgtgatggcctatgaccgatttgtggccatatgccaccctttacactacacaacaaagatgacccatcagctttgtgcctttcttgttgttgggtcctggatggtagccagtctgaatgctctgttgcacacactgctcgtggctcaactctacttctgtggggacaatgtgatcccccacttcttctgtgaagtgactcccctgctgaaactctcttgctcagacacacatctcaatgagttgatgattcttgctgttgcagggctgataatgttagctccatttgtttgcatcctcttgtcttatatccttattgcttgtgccatcctgaaaatctcatccacaggaagatggaaagccttctctacctgtggctcacacttggctgttgtgtgcctcttctatggcactatcatatccctgtatttcaacccctcatcttctcactcagctgggagggacatggcagctgccatgatgtacacagtggtgacccccatgatgaaacctttcatctacagcctgaggaacagggacatgaaaggggctttaaggaaagtgcttaccatgagatttatatctacacagtaa

SEQ ID NO: 273 - DNA, 939 bp, Mus musculus
  MOR141-3
atggaaccagaaaaccacacagggattccagaattttacctgttgggactttcagagaatccagagattcagtccgttctctttggactgttcttgtctttgtacttggtgaccgtctttgggaacctgctcatcatcctggccattgtctctgaccctaagcttcacacaccaatgtatttattcctctctaacctatccttctctgacatctgtttcacctctaccactgtcccaaagatgctgctgggcatccagactcagagtaagctcatcacctatgcaggctgcatcacacagatgtacttcttcacagtctttggacttctggacaatctgcttctgactgtgatggcatatgaccgctttgtggccatctgccaccccttgcactatacagtgctcatgaaccctaagctctgttcccagctacttctcctggcatggcttataagcatacttggagccctgcctgagagtttaactgcactgagactgtctttctgtgcagtcgtggaaattccacactatttttgtgaactccctgaagtccttaagctagcctgctctgacaccttcatcaataacgttgtgttatatattgtaacaggcatcatgggcttttttcctcttgctgggatacttttctcttactctcaaattgtgacatctgtcttgcggatttcaacagtgggaggaaagtataaagcattttccacctgtggttctcatctctcagttgtgtctctgttctatggaacctgcctgggggtgtacctcagttctatctggacacaggcttcttgggcaggggtgtttgcttctgttctgtacactgtggtcactcccatgatgaaccctttcatctatagcctgaggaacagggacatgaagagagccctgaatacactactatgtagtgtgccatcctcatcttga

SEQ ID NO: 274 - DNA, 960 bp, Mus musculus
  MOR262-2
atggttcagggaaattggacctctgtcacagtgtttgtttttctgggattttcgcactaccccagaattgaagtcaccgtatttgtgctgtgtctgctgatgtatctgatcaccttgctgggaaatactattctgatctccatcactatccttgattctcatctgcacactcccatgtactttttcctcagcaacctctcatttctggacatctggtatacctcttctgctctcactcctatgctggcaaactttgtttcagggaaaaacaccatttccttctcgggatgtgcctcgcagatgtacttctctcttgccatgggctccactgaatgtgtgctcctctctatgatggcctatgacaggtatgtggccatctgtaacccactgagatatcccattattatgaacaggagggtctttgtacagattgcaggcagctcctgggttacaggctgcctcactgccttggtggaaactggacctgtgattcatctgtctctctgtggtaacagcatcatcaatcatttcacctgtgaaattctggctctcttaaaaatggcctgtggagacacttccatggtgcagctaattatgttagtgatcagcattcttcttctcccattgccaatgttgctcatttgtgtctcctatgcatctatcctctccaacatcttgaggatcagctcaatggatggccgaagcaaagccttttcaacatgtgcagcccacttgactgtggtggttctgttctatgggacagctctctccatgtacctgaagccctcatctgtaaactcacaggaaatagataaatttatggcattaatatatgctggactaacaccaatgctaaatcctattatctacagtctacggaacaaagaagtaaaaatggctgtgaaaaaattgttgatgagaaaccccttcagtgctatcttaacttctgtcctcaaataa

SEQ ID NO: 275 - DNA, 951 bp, Mus musculus
  MOR262-3
atggaatgggaaaatcggacttatttggaggaattttttctgaaggggctttctggttacccaggccttgagcatctcttttttgtggtcatcttaatgatgtatgcagttatcctagtgggcaatggcacccttattattctcagtattttcgactctcacctgcacacgcctatgtacttctttctggggaacctgtcgttcttggacatctgctttactacctcctctattcccttcaccctggtaagctttctctcagaaagaaaaacgatttccttccttggctgtgcagtacagatgtttcttggcttggccatgggaacaacagagtgcgtgctcctgggcatgatggcctttgaccgctatgtggccatctgcaaccctttgagataccctctcattatgagcaagagttcctatgtgaccatggcaacagggtcttggttttcaggggttgccaactctgcagtacaaactgcatttgtgatgcggctgcctttctgtggaaatgtcatcaatcattttctctgtgaaatcctggctgtcatgaagatggcttgtactgacatctcaggcaatgaattcatcatgcttgtggccacaactttgttcactctgatgccactggtcctcattgtcatctcgtactcattaatcatctccagcatcctcagcattcgatctgctgaggggagaagcaaggccttctctacctgctcagctcactttactgtggtgataatcttctatgggaccattcttttcatgtacatgaaacccaagtctaaagacaaattcgatgcagatgacttggatgctacagacaaacttatatccatgttctatggggtgatgactcccttgatgaatcctttaatctacagcctcagaaacaaagatgtgaaagaggccataaaaaatctgaagggaagactcttaggcaaatga

SEQ ID NO: 276 - DNA, 918 bp, Mus musculus
  MOR224-1
atggaaaatcatacattgctggatgaatttattctattgggaataccccagacacaaggactggagactctactatttgtggtgttcttattcatatacatctttaccttgcttggaaatttactcatctttacagcaatagtttcttcatctacccttcacacccccatgtatttcttcttgggacttctatctatttttgacatgttgttcccatcagtaacctgtccaaaaatgctactttacctctctggcaagagcccagccatctcttacagaggctgtattgcacagctcttcttttatcattttctgggttctactgaaggatgcctctactctgtgatggcctatgatcgttatgttgccatatgtcacccactgagatacatgcttatcatgaaacctggagtgtgcctgggcttggtcatagtatcctggttgataggatgtcttcagtctggcatcctgacattttttacctttcagttaacctactgtgggcccaatcatgtccatcatttcttctgtgacattcctgcagttttacccctggcttgtactgataataagttggcccggaaggtgggttccatcaatgttggctttctggctctgatgcttctcttcagtgtttgtgtctcttatgtacacattggggttgccattctgaggatccgttcagcagagggcaggcagaaagcattcttcacctgcagtgcccacctcactgccattctctgtgcctatggacctgtaatcatcatctacctgcagcgcacaccaaaccctctgcttggggctgtggtgcagatattaaataatattgtctcacccatgctcaactctttaatatattcactgaggaacaaggaagtgaagagggccctgagaagggtgtttcacagtttagcttag

SEQ ID NO: 277 - DNA, 936 bp, Mus musculus
  MOR171-4
atgagcataaggaatcactccacggtgactgagtttctcctgttgggattaactgaggagccagcgctccagctgccccttttctgcctcttcttggggatttacatagtcacaatggtgggaaatcttggcatgattgcagtcatcaagctgaactctcaacttcatacccccatgtattatttcctcagtagtttgtcttttttagatttctgctactcttctgttgttacccccaaaatgctggtggggtttttaagcagggataaggctatctcgtattctgattgtatggctcagctgttctttttctgtatttttgtcatctctgaatgctacatgttggcagccatggcctatgatcgctatgtggccatctgcagtccactgctctatgctgtcatcatgtcgcctcgggtctgttctctgctggtggctgctgtcttttcagtgggctttactgatgctgtgattcatgggggatgtatattaaggttatctttctgcaaatccaacatcattaaacactatttctgtgacattgttccacttattcaactctcctgctccagcacttacattgacgaacttttgatctttgtcattggtggatttaacatgatagccaccagcctgacaatagtcatttcatatgggttcatcctgtccagcatcctccgcatccactctaaagagggcaggtccaaagccttcagcacctgcagctcccacctgacagctgttcttatattttatggctctctcatgtccatgtatctgaaacccgcttctaatggttccgtcatccatgaaaaagtgacctcagtgttttacaccacagtgattcccatgttaaatccactgatctacagtctaaggaacaaggaggtaaaacatgcactggtgaagcttgtcagaagaaaaatatcttcataa

SEQ ID NO: 278 - DNA, 966 bp, Mus musculus
  MOR223-4
atggttgagaggatgcagtaccttaaccagtctgtggtgagccagttcttcctggagggtctgatgtacacggctgagcaccctggcctcttcttcctcctctttctcctcatctacagcatcactgtgagtggcaatctcctcattctccttactgtgggctctgaccctcatctccgctcccctatgtaccacttcctgggccacctctccttccttgatgcgtgtctgtctacagtaacagtgcccaaggtcatggcaggcctgctgactttggatgggaaggtgatctccttccaaggctgtgctttacaactttattgcttccacttcctggccagcactgagtgttttttatacacagtcatggcctatgaccgttacctggctatctgtcagcccctgcactacccagtggttatgaacaagcgggtgtgcgcagggttggctgggagcacatgggccataggtgctatgcattctgcaattcacacttccctaaccttccgcctgctgtactgtgggcctcagcatattgcctacttcttctgtgacatccctccagtactgaagctggcctgtgctgacaccaccatcaacgagcttgtcatgcttgcaaacattggtgtggtggctgcgggctgcctcattctcatcatcatctcctacgccttcattgtggctgcggtgttgcgcattcgcacagcggaggggcgtcagcgagccttctccacttgcacagcacatctcaccgtggtgctcctgtattacatgcccccggtctgtatctacctgcagccaagctccactggcgcaggggcgggagctccagcagtcttctacacaatagtcactccaatgctcaatcctttcatctacacactaagaaacaaggaagtcaagcgggctctgagaaggttagtatgtagctcccaagagtctccagcaagcagccctgccccctga

SEQ ID NO: 279 - DNA, 927 bp, Mus musculus
  MOR258-1
atgcaaggtcccaatcagacctttgtgacagaattcatccttctgggcttctccctgagccctaggaccacacctcttctcttctcagcctttctgataatttacttgttgatcattctgggcaatggcttgatcttcatcctcatctgcttggactcacacctccatacccccatgtatttcttcattggtgttctttccatgttggacttaggctacaccaccacaactgtgccccagatgttggcacatctggccagccagaagaagacaatctcttactccaattgtgtggctcaaatgtacatttttttggtgctgggtgtcacagagtcttggctttttgccatcatgtccatagacaggtatgtggccatctgccacccactcaggtacaaggtcatcatgagcccatgtctatgtggggtaatggctattttctgtggactctgtggtgtcaccgctgctcttgtctataccatctttgccatgcgccttccctactgtggccccaacaagatcaaccacttcttctgtgaagtccctgcagtcttaaagctggcttgtgcagatacatcagtcaatgaccatgtggacttcatacttgggtttagtgtcatactgatccccctgtcccttatcctggtcatctatatcaacattttcacttccatcttgaagatccgttcagcacaggggcgactgaaagccttctctacctgtgcatcccacatcactgtggtcaccatgttctgtgtgccagccatggtcatgtacatgaagcctggttctaaagcctccccagaagaggacaaaaagcttgccctattctacaatgtcatctctgcctttctcaaccctgtcatctatagtctccggaacaaggaatgtgaagagggctttcctcaaggtaacaggctgtggtag

SEQ ID NO: 280 - DNA, 948 bp, Mus musculus
  MOR258-2
atgcaaggctcctcctatgagaatcacagctccgtgtctgagttcatccttctgggtttctccagtaatttccaacttaatataatcctcttcaatgtcttcttcttcctctacctctctacgcttgtgggcaatgggctcattgtcaccttgatccacctggactcccgtctccatacacccatgtacttcttcctcagtgtcctttccatgcttgatatgagctatgtcaccaccacagtgcctcagatgttagtgcatctcctctgccagaagaaaactatctcctattctgggtgtgtggcccagatgtacatctttctggtgttaggcatcactgagggctggttgttctctgtcatggcctatgatagatatgtagccatttgccacccactcagatataaggttatcatgaggccttggctgtgcggggcaatggtagtcttttgtggactatggggtgtcagctgttctctgatctacactgttttcactatgaggctgccctactgtggccccaatgagatcaatcacttcttctgtgaggtccctgctgttctgaagcttgcctgtgcagacacatccctcaatgaccggatagactttatcctaggctttatccttctcctggtacctctttccttcatcctggcctcttacgtctgcatctttgccaccattctgagaatccgctcagcccaaggtcgactgaaggccttttccacctgtgcctctcacatcactgtggtcaccatgttctgtggacctgccatgtttatgtacatgaaccctggggccaacgcctccccagagagggacaagaaactggctctgttctacaatgtcatctctgctttcctcaaccctataatctacagcctcagaaacaaagatgtgaagagggctttcctcaaagtaacaggctggggaggagccactgagtga

SEQ ID NO: 281 - DNA, 930 bp, Mus musculus
  MOR220-1
atggccaattccaccctggtgcctgagttcctcctggaagtttttgctgagacttgggaactcaggatcctactcactgtgctgttcttgttgatgtacctgggcagcctgttggggaatcttatcatcatcattgctactacagttgaccatatcctgaatacacccatgtacttcttcctcaggaatctgtctattttagacatggggtatgtatctgttactgtgcccaatgcttgtatcaactctctcactgatcacaggagcatttctttggctgggtgtgcaggacagatctttttggttttcttttctgcatgtgtagagattcagtttctcaccatcatggcccaggaccgctatgtggccatctgtaagcctcttctctatgctatgattatgaaccatcaattctgtgttcagatgacactggcttccctacttacctctcttatccttgcaagtgtgcacacttccaaaactttccagctatccttttgtcactctaatgtagtctctcagttcttctgtgatatcccctctttgctgaggctttcttgcactgacacctttatcaacaaactattacttcttctgactgccattgtttttagtggtagctgctttaccttcattgccatatcatatgttcgcatattatcaactgtcttgaaggttcctgtcaaaggagagagaggaaaagccttttccacctgtgtccctcacattattgtggtgtctgtgtttcttagttctggtgcctatgtatatttaaaaccttcagcaatctcagaaatagttgaggatatgacactttctgtattttataccattgttcctccattcttaaaccctattatctatagtcttagaaacaaacagataaagaaggctgtgaagaaagtaatatttagatttttcatagtttaa

SEQ ID NO: 282 - DNA, 939 bp, Mus musculus
  MOR262-4
atggagcccagcaacagaactgcagtctctgagtttgtcttgaagggattttctggctacccggccctcgagcggctactctttcctctgtgctcagtcatgtacctggtgactctgctggggaacacagccatcgtggcggtgagcatgttggatgcccgcctgcacacgcccatgtactttttcctgggtaacctttccattttggacatctgctacacatctacttttgtacccctgatgctggtccacctcctgtcgtcccggaagaccatctcctttacgggctgtgccgtccagatgtgtctgagcctctccacgggctccaccgagtgcctgctgttggccgtcatggcctatgaccgctacttggccatttgccagccactcaggtaccccgtgctcatgagccacaggctctgcctgatgctggcaggagcctcctgggtgctctgcctcttcaagtcagtggcagagacggtcatcgccatgaggctgcccttctgcggccaccacgtgatcagacacttcacctgtgagatcctggctgtgctgaagctgacctgtggtgacacctcagtcagcgatgccttcctgctggtgggggccatcctcctgttgcctatacccctgaccctcatctgcctgtcctacatgctgatcctggccaccatcctgagggtgccctcagccaccgggcgcagcaaagccttctccacctgctcggcacacctggctgttgtcctgcttttctatagcactatcatcttcatgtacatgaaacccaagagcaaggaagcccggatctcagaccaggtctttacagtcctctacgctgtggtgacccccatgctgaaccccattatctacagcctgaggaacaaggaggtgaaggaagcggccaggaaagcttggggcagcagatgggcctgtaggtga

SEQ ID NO: 283 - DNA, 960 bp, Mus musculus
  MOR262-5
atggagagatccaacaagaccacccctgtgtccagcttcatcctcctgggtctctccgcccacccaaagctggagaaaaccttcttcgtgctcatcctgctgatgtacctggtgatcctgctgggcaatgtcgtcctcatcctggtgagcatcctcgactcccacctgcacacgcccatgtacttcttcctggggaacctctccttcctggacatctgctacaccacctcctccgtccccctcattctggacagcttcctgacccccaggaagaccatctccttctcgggctgtgccgtgcagatgtttctctccttcgccatgggagccacagagtgtgtgctcctgggcatgatggcgtttgatcgttatgtggccatctgcaacccccttagatatcctgtggtcatgagcaaggctgcctatgtgcccatggccgccggctcctgggtatctggaagcatcactgccacagtgcagatatctttagcaatgacactgcccttctgtggggacaatgtcatcaatcactttacatgtgagatcctggcagtcctgaaactggcctgtgctgacatctccatcaatgtcatcagcatggcagtggctaatgcaatgtttttgggggtccctgtcctcttcatctttgtctcctacatcttcatactctccaccatcctgaggatcccctctgccgaggggaggaagaaggccttctccacctgctctgcccacctcaccgtggtacttgtcttctatgggaccatcctgttcatgtacgggaagcccaaatccaaggacccattgggggcagacaaacaggaccttgcagacaagctcatctccctcttctatggagtggtgacccccatgctgaaccccatcatctacagcctgaggaacaaggatgtgaaggccgctgtgacaaacctggtgggccagaaacacttcaagtggtga

SEQ ID NO: 284 - DNA, 957 bp, Mus musculus
  MOR262-6
atggaaggagccaatcagtctacggtagctgaatttgtcttgctggggttgtcagatcacccaaagctggagaaaaccttcttcgtgctcatcctgctgatgtacctggtgatcctgctgggcaacggcgtcctcatcctggtgagcatcctcgactcccacctgcacacgcccatgtacttcttcctggggaacctctccttcctggacatctgctatactacctcctcgattcccttagtcctggatggttttctcacccccaggaagaccatctccttctcgggctgtgccgtgcagatgtttctctcctttgccatgggagccacggagtgtgtgctcctgggcatgatggcgtttgatcgttatgtggccatctgcaaccctcttagataccctgtggtcatgaacaagtctgcctatgtgcccatggccgtcagctcctgggtggctggcggtgctaactccttggtgcagatctcccttgcggtgcagttgcctttctgtggggacaatgtcatcaatcacttcacctgtgagatcctagcagtcttaaagctagcctgtgctgacatctccatcaatgtgatcagcatgggggtggccaatgtgattttcctgggggttccagttctgttcatctttgtctcctacatcttcatactctccaccatcctgaggatcccctctgccgaggggaggaagaaggccttctccacctgttctgcccacctcaccgtggtacttgtcttctatgggaccatcctgttcatgtacgggaagcccaagtccaaggacccattgggggcagacaaacaggatgtttcagacaagctcatctccttattttatggggtgctgacccccatgctgaaccccatcatctacagcctgaggaacaaggatgtgaaggccgctgtgaggaacctggtaggtcagaaatgcctgattcagtga

SEQ ID NO: 285 - DNA, 939 bp, Mus musculus
  MOR174-1
atggatgaggaaaactgcagcactgtggcacagttcatcctcctgggattttcagatgtccccgagctgcgtggtgttctctccttgctttttctcctcatttatggagtcaccgccctggccaacctgggaatgactgcactgattcaggtcagctctcaacttcacacccccatgtacttttttctcagccatctgtcctttgtggatttctgctactcctccgtcattgtgcctaaaatgctagctaacatcttcaataaggacaaagcaatatcattcctggcatgtatggtccaattctacctgttttgcacatgtgtggtcactgaagtcttcctactggctgtgatggcctatgaccgttttgtagccatctgtaacccactactatatacggctaccatgtcctcagatctccgtatgatactggtgtctggatgctacctgtgtgcatcaatgtgttctctgattcatttgtgcttagcccttgagatcccatcatttaagtcaaatgtgatcaatcacttcttctgtgatctgcctcctctcttgagccttgcttgctctgatgtcactgttaataaagtgctgctgtttgttgtagccaccttcaatgagagctttagtattgtggttatcttcacctcctacttgtttatcctcattaccatcctgagaatgcgctctgtagaggggaggcgcaaagcattttccacctgtgcctcccacctcacagtcatcattgtcttccatgggacgatcctttccatttattgttcttctacttcagacaacagtggagatgctgacaaagtggccacagtgttctacactgtagtaattcccatgctgaaccctttgatctacagcctgagaaacaaggatgtcaaaggtgctctcaggaaagttgtgaactctaagatatattcccaatga

SEQ ID NO: 286 - DNA, 966 bp, Mus musculus
  MOR174-2
atgttactgacatatggaaataacagtggggccatgttcatcctattgagcttctcagattacccagaaatagagatgcctctcttcttggtgtttcttgccatctacagcatcactgtggtaggaaatattggcatgatagtcataataagaattaatcccaaactgcacactcccatgtacttcttcctcagccacctctcctttgtggatttctgctattcctctgtcattgctcccaagatgctggtgaatctttttataaaaaacagagccatctcatttttagaatgtatagtacaatattttttctttgctatctttgtggtaactgaaaccattttattagtggttatggcctatgacagatttgtggccatctgcagaccactgctttacacagtagccatgtctcagaaactctgcatcagtctagtggtgggatcatatgcatggggactcatatgttccttgacaatgacatgctctattatccagttatcttttgttggtatcaacacaattgatcatttcttttgtgagttctcctcacttctggttctttcatgctctgatactcatgttaatcaaatacttctcttctcactttctactgtgaatgctcttagtactctactcatcatccttctgtcatatatgtttatccttgtcaccatactcaagatgcaatcatccaggggccgccaaaaggctttctatacgtgtgcttcacacctgactaccatcactatcttctatggtactatcctgtttctctactctgtacccaactcaaagaactcccagctcacattcaaagtggcctctttgttttataccctggtgatccccatgctaaaccctttgatttacagtctgaggaataaagatgtgaaggacacagtcagacaaatcatgaagattaaatttatagctctcccccatttatcctctaaagtacgttga

SEQ ID NO: 287 - DNA, 927 bp, Mus musculus
  MOR213-1
atggatgaggaaaatattactgaagtgacagagtttattcttttaggattcacagaagatgcggtgttacagcaagtactctttttcatcttccttaccatttacatcatcagtctgctagggaatattactctgatttctctcatctgtgctgattcacgactccatacacccatgtatttcttcattggaaacctgtcatttctggatctgtggtattcttctgtctatgctcccaaaatcctgataacatgcatcactgaagacaaaagcatctcctttgctggttgcctggctcagttcttcttctctgctgggctggcctacagtgaatgctacctactggctgccatggcttatgatcgttatgtggccatctccaaccccttgctttacttccaggctatgtctccaaggttacgtgccagtcttgttgcagcatcctatcttggtggctttgcaaactccaccattatcaccagtgagacatttaccctgagtttctgtcgagacaatatcattgatgacttcttctgtgatctgcctcctcttgtgaagttggcatgtgatgtgaaagagagctaccaggctgtgctctatttcatattggcttctaatgtcatcactcccactgtgcttattttggcctcctacctcttcatcattgtagccatcctgaagatccgctccacccagggccgcctcaaggccttctctacatgtggttcccacctgacagctgtcactttgtactatggttcaatcctctttatttactcccggccaagcacaagttatgccctggagagggacaaagtggtgtcagtgttctatactgtagtgattccaatgcttaaccctatgatctacagcttacgaaataaagatgtcaaggatgcattgaggaaaatgttagacatagtcaag

SEQ ID NO: 288 - DNA, 942 bp, Mus musculus
  MOR188-4
atgaaggaacacaatctcacagtaatgactgaattcatcctaatgggtatcagtgaccactctgaattgcaggccccattatttgggctgttccttgccatatacatgacctcaatggtaggtaatttgggaatcattgttctcaccacagtggactcacgcctgcaaacacccatgtacttctttctcagacacctggctattacagatcttggatattctacagctgtgggacccaaaatgttggaaaattttgttgtagatcaaaatacaatttcatttaatctttgtgccacacaactagctttctttcttgtattcattggtagtgagctattcattctctctgcgatgtcctatgaccgctatgtggccatctgtaagcctctgctctacactgtcctcatgtcccaaaaactatgttgggttcttatgtcaatgccttatctctactgcacatttgtgtctcttctcatcacagtgaagatttttacttcatccttctgtggctacaatgtcattaaccatttctactgtgactgtatccccttgctgtctctactctgttcacatgcagaggaaatcgcatttattgttatgatctttgcagcttttgatttgattgtgtctcttcttattgttctggtatcctacatgtttatcctcatagcagttctcaggatgaactctgcagagggcaggtacaaggctttctccacatgtgggtcccacctgacagtggtgacagtgttctatggtactttaatatttatgtatgtacaacctcagtccagtcattctgatgacaatgataaggtgtcttcaattttttacaccctcgttatacccatgctgaatcctttgatctatagtttgaggaacaaggatgtaaaatttgccctacataggacttggagaaatatttgtaagatcttcccttag

SEQ ID NO: 289 - DNA, 942 bp, Mus musculus
  MOR188-5
atggaaaagaacaacctcacagcagtgactcaattcatcctgatgggtattactgagcgccctgaactacaggccccattgtttggattgttcctagtcatctacttgagctcaatgtttggcaacttgggcatgatcattctaaccacagtggactccaaattgcaaacacccatgtactttttcattagacacctggctatcacagaccttggttattctacagctgtgggacctaagatgttggtaaattttgttgtagatttgaacataatctcctataatctttgtgctacacagctagctttttttcttgtgtttataattagtgagctttttattctgtctgcaatgtcctatgaccgctatgtggccatctgtaagcccctcctctacactgtcatcatgtcgcaaagggtgtgtcaggtgctggtggcaatcccctatttgtactgcacatttgtttctcttctagttaccataaagatttttacattgtctttctgtgggtataatgtcatcagtcatttctactgtgacagtcttcccttgttatctttgatctgttcaaacacaaatgaaattgaaatgattattctggtcttagcagcttttaatttgatatcctcccttctagtggtccttgtttcttacctgttcatccttatagccattctcagaatgaactcggctgagggcagacgcaaggctttctcaacctgtggttcccacctgacagtggtcactgtcttctatggtactttaatatttatgtatgtgcagcctcagtccagtcactcttttgacacggataaagtggcttccatcttttataccctgattatacccatgttaaaccccatgatatacagtttgaggaacaaagatgtaaaatatgcacttcaaaggtcattgaaaaagatatacagcatactctcataa

SEQ ID NO: 290 - DNA, 927 bp, Mus musculus
  MOR206-1
atgaaccctgagttcatgcttgtgggactgacagattccaaggagattcagctggtcctctctgttttgtttctcctgatatacatgctcactgtcttgggaaacataggtataatactgatcattcatctagatgtccagctccacactccgatgtattttttcctcacccacttgtcattccttgacctcagttattcaactgtaatcacacctaaaaccttacagaatacgctgacctccataaaaaatatttccttcatgggatgcttcacccagttgtatttctttgccttcttagcaggttctgaatgttttatactttcgtcaatggcctatgaccgctatgtagctatctgcaaccctctacactatccagttattatgtcccctaggcgctcatatattctcatcactgtgtcctacatcgttggagctatagattcctctgccactgtcttttggttaagcacactggatttctgcaactccacggtaattcatcacttcttttgtgacacattcccaattttagctctgtcctgcagtgatacctataatgcagaagccacaatattcgttttagctggttccactctattgctgtcgctaatcacgatatccgcatcctatgtatctattctctctacaattttgaagataaattcttcttcaggaaagcacaaagccttctctacatgtgcctcacatcttataggagtcactgttttttatggtacaacgatctttacttatttaaaaccaagtacgtcctactccctgggaaaggatcaagtagcccccgttttttatactatagtgattcccatgctgaacccacttatctatagtctcaggaacaaagaagtgaaaagtgctgttgttagagttatgaagaagagagagtgcatccagaaactaaaataa

SEQ ID NO: 291 - DNA, 939 bp, Mus musculus
  MOR172-2
atgagagtttggaatcatacaggggtcaaggaattcatgctccttggcttaacagaaaaccctaattgtcaggttcctctctttttgcttttcagtatagtgtatctcatcatacttgtgggtaattgggggatgattatcttgatctggctgaatgcccaccttcatacaccaatgtacttcttccttagtaacctctctttctgtgacatctgctactctactgtcattgctcctaaaatgctcatcgattttctctcagaacacaagtctagcacattctttggctgtgttcttcagagtttcttttttgcagtatacataactacagaaggtattcttctgtctatgatggcttatgaccgttatgtggcaatcgcaaaccccttaatgtatacagttattatgacccacagaatctgcagtcagatggttcttgcatgttacttgggtggcctcattaattccctgactcacacaataggtttactcagactggacttttgtggtcccaacatagtgaatcacttcttctgtgacatccctcctcttttgaagcttgcgtgctctgatgcacacatcaatgagatgctgcttttggtcttctctggagtgattgctattttcactttcatcattgtcatggtgtcctatatccatattatcattgccatcctgagaatccgctcagctgagggaaggcgcaaagccttctccacttgtgcttcacacctgacagctgtgatattattttatggttctgtgacatttagttatatccagcccagctctcagtactccatggaacaggaaaaagtctctgctgtgttttacaccttagtcattcccatgctaaatcctctaatttacagtctgaggaacaaagatgtgaaagaagcagccaagaagttcattggtagggagaggagaacctcttga

SEQ ID NO: 292 - DNA, 948 bp, Mus musculus
  MOR206-2
atgagtgcctgtaatcatacaaatgaacctgagttcacgcttgtgggactgacagactccaaggagattcagctggtcctctctgttttgtttctcctgatatacatgctcactgtcttgggaaacataggtatgatactgatcattcatctagatgtccagctccacactccaatgtattttttcctcacccacttgtcattccttgacctcagttactcaactgtaatcacacctaaaaccttacagaatacgctgacctccataaaaaatatttccttcatgggatgcttcacccagttgtatttctttgtcctcttggcagcttctgaatgttttatactttcgtcaatggcctatgaccgctatgtagctatctgcaaccctctacactatccagttattatgtcccctaggcgctcatatactctcatcactgtgtcctacatgattggagttttggattcctctgtcactgtcttttgcttaagcacactggatttctgcaactccaaagtaattcatcacttcttttgtgacacattcccaattttagctctgtcctgcagtgatacctataatgcagaagccactatattcgttttagctggttccactctattgctgtcgctcatcacgatatcctcatcctatgtatctattctctctacaattttgaagataaattcttcttcaggaaagcacaaagccttctctacatgtgcctcacatcttataggagtcactgttttttatggtacaatgatctttacttatttaaaaccaagtacgtcctactccctgggaaaggatcaagttgcctccgttttttatactatagtgattcccatgctgaacccacttatctatagtctcaggaacaaagaagtgaaaagtgctgttgttagagttatgaagaagagagagtgcatccagaaactagaataa

SEQ ID NO: 293 - DNA, 942 bp, Mus musculus
  MOR244-1
atggaaaaggctgtcctcatcaaccaaacttcagtgatgtcatttcggctcacaggtttatctacaaatccgaaagtacagatggctatttttttcatattcctcattttttatgtcctgacactggttggtaacatcctcattgtcgtaacaatcatacacgaccaccgactccatactcccatgtatttcttcctcagcaatctgtcctttattgatgtctgccattccactgtcactgtcccaaagatgctaagtgacaccttctcagaagaaaagctcatctcctttgatgactgtgtggtccagatatttttcctgcatctctttgcctgcacagagatcttccttcttactgtcatggcctatgatcgctatgtggccatttgtaaacctttgaggtatatgacaataatgaactggaaggtgtgtatggtgctaggaggggccatgtggacagcagggaccatacactccatatctttcacctcactcaccatcaagctgccttactgtggtcctaatgagcttgacagcttcttctgtgatgtacctcaggtgatcgaactggcttgcactgacacccgtatcactgagattctcgttgtctccaacagtgggatgatctctatggtatgttttgtgattattgtagtgtcctatgcagtcatccttgtgagtctgaggcaacagatctctgacggcaagaggaaagccttgtccacctgtgcagcccatctcaccgtagtcactctgtttctgggacactgtatcttcatctactcacgcccagccatcagccttccagaggacaagattgtatctgcatttttcacggccataacccctctgctgaaccccataatctacacctttaggaatgaggacatgaagagtgccttgaagaagttaatcaggagaaaagaggggaaagaaaagtga

SEQ ID NO: 294 - DNA, 957 bp, Mus musculus
  MOR31-10
atggcaacatcttcaaccactttaaattacaccaatgtcagagacatctggtataccatgattgggatcccaggactagaatatgcacacatatggatctccatccccatctgttcaatgtacatagtggccattgcaggcaatgcactgctattattcctgatcatcactgaacgcagccttcatgaacccatgtaccttttcctgtctatgttggcactcgctgatatctttctgtctacagtcacaacaccaaaaatgttagcaatcttctggtttagagctggaggcatttcttttgctagctgtgtatctcagatgttcttcctccacttcatatttgtggcagagtctgccatactgctagctatggcatttgaccgttatgtggccatctgttatccactaagatacaccaccattctaaccacatctgtcatcatcaaaatgggcattgcagctgtgattagaagcttcttcatctgcttccccctgatctttcttgtctataggctcacctattgtgggaagagcaccattcgtcactcatactgtgaacacatgggcattgccaggttggcctgtgacagcatcaaggtcaatatttactatggtgtgatagtggctctgttttccacatgcttagatgcagtgctgatcattgtctcatatgcccttatcctttgtgctgtgtttagaattccttctcgagatgcccgactcaaggctctaggtacttgtggttcccatgtctgtgttattcttctgttctatacaccagcattcttttctttctttgctcatcgttttgggggtcacagtataccattgcatgtgcacattcttcttgccaatctgtatgtggtagtaccaccctctgtcaaccccatcatttatggagtgaagactaaacaaattcaggagagggttatccaagtcttttctttgggcaagtaa

SEQ ID NO: 295 - DNA, 951 bp, Mus musculus
  MOR42-1
atgttgggttggagcaatggcacctacaatgagtcctacaccagcttcctcctcatgggcttcccagggatgcaggaagccagagccctcctggtgctgcccttcctcagcctctacctggtgatcctcttcaccaatgccctggtcatccacacggtggcatcccagcgcagcctgcaccagcccatgtacctgctcattgccctgctcctggctgtcaatatctgtgctgccaccacggtgctgccccccatgctcttcagcttctccacacgcttcaaccgcatctccctccctcgatgcttgggacagatgttctgcatctactttctggtttctatggactgcaacatcctcctggtcatggctctagatcgctatgtggctatctgctaccctctccgctacccagaaatagtgacaggacagttactggctggtctggtggtgttggcagtcaccaggagcacaagcattgttgctccagtggtggtgctggcctcgcgggttcgcttctgccgctcagatgtgatccgccactttgcctgtgagcacatggccctgatgaagctctcctgtggagacatctcgctgaataaaacggcgggactcattattcgaacctttaatagagtcctggatatgctccttctaggcacctcctactcccgcatcatccatgctgccttcaggatctcatcaggtggagcacggtccaaagccctgaacacctgtggttcccacctgctggtcatcttcaccgtctactcctccaccatgtcctcatccattgtctaccgtgtggctcgcactgcctcccaagatgtgcacaacctgctcagtgctttctatctgttgctcccgtgtctggtcaaccccatcatctacggggccagaaccaaggaaatcaggcagcacctggtaaggtcattcctgagtgcaggcccctga

SEQ ID NO: 296 - DNA, 960 bp, Mus musculus
  MOR262-7
atggagatgaccaatgattccatgttgacagaatttctcttggtggggctttctgatcacccgaagctgcagacggttttatttgtgctagttttgtgcatgtatctgatgatcctgcttggaaatggcgttcttatcgcagtagtcatccatgacatccgcctgcacactcccatgtattttttcctctgtaatctttccttcctggacatctgctacacaagctcttctgtccccctaattctcagtagcttcctgacagtaaggaagagagtgtccttctctgagtgtatgattcaaatgttcttctcctttgccatgggtgccacagaatgtgtacttctaggcacgatggcacttgaccgctttatggccatctgttacccactgaggtatcctgtcatcatgagcaaggatacctatgtgcccatggcagctggatgctgggttgctgggcttgttgactcagtggtacagacctctcttgcagtgcaattaccattctgcactaataatgtcattcaccacttcgtctgcgaaattctgggcattctggaactggcttgtgcagatatttcaatcaacgtgatcagcctaacagggtcaaatctgctttttctagctgttccgttgctagttattgctgtctcttacatgttcatcattgcaactattttgaggattccttctgctgaaggaaaacggaaggccttctccacctgctctgcccacctgacagtggtaattatcttctatggaaccatcttctccatgtacgcaaagcccaagtctaaagacaccgctggggcaggccatcaaagcgtgatggaggccctcatctccctcttctatggggtgatgacccccatgctcaatcctcttatctacagtctgaggaataaggatgtgaaggctgctgttcagaacatgctgggaaggaaaacgttgagtaagatgtaa

SEQ ID NO: 297 - DNA, 945 bp, Mus musculus
  MOR264-4
atgaaattcacagaaatcagggcagaggataatgcttccactgtgacagagtttctcctcctgggattttcagaccttcctaacttacaagggattttgtttgggatgttctccataatttacttgatcatattggttggaaatagtttcataattgtgataactagaattgatcctgcactacagaagcccatgtattttttcctggcaaatttttcttctctggaaatctgttatgtatcagtcactcttcctagaattctgtttagcattgctactcaagagagaaagatttctgtcctcagctgtgccacccagttgtgtttcttccttatgctggcagccactgagtgttttctgctggctgtgatgtcctatgatcgctatgtggccatctgcaatcctctgcactatcctttggtcatgaacccaacaaagtgcactcagctggcagcagcttcctggcttggaggcatcccagttcagataggacaaacctgtcagatattctctctacatttttgcaattctacccaaatcaaccacttcttgtgtgacataccacccattctcaagctggcctgcggagacacgtcaataaatgagctatctgtctatttagtggctatattatttgctgcagtcccttttatgttgattcttgcatcttatggcaaaatcattgccaccattctgaagttgccaacagccacaggacgggcaaaagccttctcaacatgttcttcccacttgcttgtggtgtttttgttttttggatcagctactattacctacttgaggccaaagtccacccattctccaggaactgacaaactattctctctgttttacagcattgtgactcccatgttaaatcctctgatatacagtcttagaaacaaggaggtgattgctgcactgagaaaattgttacgtatcaagtag

SEQ ID NO: 298 - DNA, 945 bp, Mus musculus
  MOR264-5
atgaaattcacagaaatcagggcagaggacaatgcttccactgggacagagtttctcctcctgggattttctgaccttcctaacttacaagagattttgtttgggttgttctccataatttacttgatcatattgattggaaatagtttcataattgtgataactagaattgatcctgcactacagaagcccatgtattttttcctggcaaatttttcttctctggaaatctgttatgtatcagtcactctccctaggattctgtttaacattgctactcaagacagaagcatttctgtggtgagctgtgccacacaaatgtgtttcttccttatgctgggagctactgagtgtttcctgctggctgtgatgtcctatgatcgctatgtggccatctgcaatcctctgcactatcctctggtcatgaacccaacaaagtgcactcagctggcagcagcctcctggcttggaggcatccctgtccagataggacaaacctgtcagatattttctctacatttctgcaattctaaccaaatagatcacttcttttgtgacttacctcccattctcaagctggcctgtggagatacttcaatacacgagttgtctgtctacttagtagctatgctgtttgttgcattccctttcttgttgatacttgcctcttataccaaaatcattgccaccattctgaagttgccaacagccacaggacgggcaaaagccttctcaacatgttcttcccatttgcttgtggtgtttttgttttttggatcagctactattacctacttgaggccaaagtccacccattctccaggaactgataaactactctctttgttttacaccattgtgactcccatgttcaatcctctgatatacagtcttagaaataaggaggtgattgctgcactgagaaaactgttacatatcaagtag

SEQ ID NO: 299 - DNA, 927 bp, Mus musculus
  MOR177-1
atggaaaagaaaaattgctcctcagtagatgaattcatcttcttgggaattaccaagaaccctgacatgagagtgaccttcttcaccacactcctacttgtttatctcattaatcttctggccaaccttgggatgatcatcttaattagagtgaacactcagctgcacacacccatgtactttttcctcagccacctctctttctgtgacctctgctattccacagcaattggacccaagatgttggtggatcttttagttgaggagaaatcgattcccattgttggttgtgctttgcagttttttacgttctgcatctttgcagattctgagtgtctactgctggcagtgatggcctatgacagataccaggccatcagtaacccattgctctacacagtgaacatgtccagccggctgtgctccctcctgatggctggagtttacctggtgggaacagcagatgctttgatacatacaaccctgaccttccgcttgtgtttctgtggatccaatgagatcaaccactttttttgtgatgtgcctcctcttctattaatatcttgctcagatacagaggtcaatgagttagctatattcacaattttcgggttcattgagctgagtaccatttctggagtccttgtttcttattgctacatcatatcatcagtcttgaagatcggttctgctgaggggcggtttaaagctttctctacctgtgcttcccacctgactgctgttgcagtattccaggggactatgctcttcatgtatttccggccaagttctgcctactctctagatcaagacaaaatgacctcactcttctacaccctggtgattccaatgttgaaccctctgatttacagcctgaggaacaaagatgtgaaagaggctgtggtaaaattaaagaataaatggtga

SEQ ID NO: 300 - DNA, 945 bp, Mus musculus
  MOR250-1
atggagaactccacttcagtggatgagtttctcttgcttggcctgaccagtgttcaaaagctgcagcccatcatttttgtgatgtttttaaccatttacttactgaatttggttggaaatggagttatattaatgatcgtcactctggaaagaagactccactcccctatgtacttcttcctaggaaacctttcttgcctggatatttgttactcatcggtgactcttcccaaggttctcatcaaccttctctcgaggcgtagggccatatcattcctaggctgcatcactcagctctacttctttcactttctgggaagtacggaggccatcttgctggctgtgatggcctttgaccgatttgtggccatctgcagcccacttcgctacactgctatcatgaatcctcagttgtgcatcctgttggctgctacggcctggttcacaagcttcttctatgctctgctgcattctgtcatgactgctcacttgaacttttgccactctcacaaactcagtcatttcttctgtgatgtcaagcccctcttagaagtggcctgtggcaatacagttctcaaccaatggcttctttctgttgtcacaggcagtatatccatgggggccttcctcctcatactcctctcctatttctacatcattgcctttcttctgttcaagaacaggtcctgcagaatgcttaagaaggctctgtctacctgcacctctcactttatggtggtttgtcttttctatggtcctgttggtttcacatacatccgccctgccacagcatcagcctcctccatgagtgaggatcgggtggtggccatcatctacagtgcagtcaccccagtgctgaacccactgatatatactctaaggaacaaagaggtgatgttggctctgaaaaagaactttgggaagaagttgtttaaaggcaactag

SEQ ID NO: 301 - DNA, 927 bp, Mus musculus
  MOR250-2
atgtctaatcaaacctcagtcactgaatttctcctcctgggagtaacagatatacaagaattaaaccctattctctttgtgattttcttcaccatctactttatcaatataactggaaatggagccatcctgatgattgtcatcttggacccaagactccactcacctatgtatttcttcctgggaaacctagcatgtctagatatctcctattctactgtaacagtgccaaagctgttgcagaacctcctctccacaagcaaagctatttccttcttgggatgcataactcagcttcatttcttccacttcctgggtagcactgagaccatgctgctgccagtgatggcatttgaccgctttgtggctatctgcagaccactccactattctgtcatcatgaatcaccagctctgtattcacatgactgttactatctggaccctgggctttttccatgccttgcttcactctgtaatgacatctcgtctgagcttctgtggtcccaatcatgtccatcatttcttctgtgatattaagccattgctggatctggcctgtggaaacactgagctcaacctttggctgctcaatacagtcacaggcaccattgccctcacttccttttttctgatatttctctcttatttctacatcatcaccaatcttctcctcaagacccgttcttgcagcatgctccacaaagctctgtctacctgtgcctcccacttcatggttgttgttctgttctatgctcctgttctcttcacctacatccgtcctgcctcaggcagctctctggatcaggatacaatcatcgccatcatgtacagtgtggtcacccctgctctcaatccactcatctacaccttgagaaacaaggaagtgaggagtgcattgaatagaaaggtgagaagatggctctga

SEQ ID NO: 302 - DNA, 942 bp, Mus musculus
  MOR250-3
atgttgaatcaaacctctgtcacagaatttatccttttgggagtgagagacatacaagaaccacagccctttctctttgctattttcttcaccatctactttgtcaatataactgggaatggagccatcctgatgattgtcatcttagacccaagactccactcacctatgtatttcttcctgggaaacctagcatgtctagatatctcctactccactgtaacagtgccaaaaatgctggagaaccttctctctacaaacaaagcaatttccctcttgggatgcataactcagcttcatttcttccacttcctgggtaccacagaatccctgctgctagcagtgatggcatttgaccgctttgtggctatctgcagaccacttcactattctgtcatcatgaattggcaggtctgtatccttatggctgtgaccatctggaccattgcttttctccatgccttgcttcattctgtaatgacatctcgtttgagcttctgtggtctcaatcatattcatcatttcttctgtgatgttaagccattactggagctggcctgtggaaacactgagctcaacctttggctgcttaataccgttacaggtaccattgcctcagtccccttttttctgacatttctctcttatttctacatcatcacctatcttttcctcaagacccgttcttgcagcatgctccacaaagcactgtctacttgtgcctctcacttcatggttgttgttctgttctatgctcctgttctcttcacctatatccgtcccacctcaggcagctctttagaccaggacagaatcattgccatcatgtacagtgtggtcacccctgctctcaatccactaatctacaccttgagaaacaaggaagtgaggagtgcattgaataggaaggtgagaagatgtctcttacttgaagaaatctaa

SEQ ID NO: 303 - DNA, 939 bp, Mus musculus
  MOR256-5
atggcattgatcaataaaagtcacccagaagagtttattctgctgggttttgcagaccgtccttggctagaacttcctctctttattattcttctggtaacataccccacagccatgattggaaacattgccataattctcgtgtctatattagacccctgtctccacagccccatgtatttcttcctcaccaacctctcctttctagacatgtgctacaccacaagcattgtacctcagatgctaaccaaccttggaagttccacaaagaccatcagctacatgaggtgtgtagttcaactttatttcttccacataatggggggtacagagtgtgtcctcctggctcttatgtcctttgaccgatatgtggccatctgcaaacccctgcactataccctcataatgaatcagcgcaactgcatcctgttagtatccactgtgtggctgactggaatttcctatgctgtctcagaggccactgtgacactgcaattgcctctatgtggccacaataaactggatcacttggtgtgtgagattccaattctgataaaaactgcttgtggtgaaaaagagactaatgagcttgctctctcagtggtttgcatttttcttttagctgttcctctgtgtttaattcttgcctcctatgctagtattggacatgctgtctttaaaatcaagtcttcagagggaagaaaaaaggcctttgggacatgttcctctcatctaattgtggttctcttgttctatggtccagccattagtatgtatcttcagcctccctcctctattacaaaagaccaacctaagttcatggctctcttctatggagtagtaactcccacactgaaccctttcatctatactctgagaaataaggatgtaaagggggcattaggtaacctgttcaagaacatttttatgtcaaagtaa

SEQ ID NO: 304 - DNA, 939 bp, Mus musculus
  MOR256-6
atgatattgatcaataaaagtcacccagaagagtttattctacttggttttgcagaccgtccttggctggaacttcctctctttattattcttctggtaacataccccacagccatgattggaaacattgccatcattctcgtgtctatattagacccctgtctccatagccctatgtatttcttcctcaccaacctctcctttctggacatgtgctacaccacaagcattgtacctcagatgttaattaacctttggggctctacaaagaccatcagctacatgaggtgtgcagttcagctttatttcttccacacaatggggggtacagagtgtgtcctcctggctcttatgtcctttgaccgatatgtggccatctgcaaacccctgcactataccctcataatgaatcagcgcaactgtgtcctgttagtgtccactgtgtggctgactggaattttctatgctgtctcagaggccactgtaacactgcaattgcctctttgtggccacaataaaatggatcatttggtgtgtgagattccaattctgataaaaactgcttgtggtgaaaaagagactaatgagcttgctctctcagtagtatgcatttttcttttagctattcctctgtgtttaattcttgcctcctatgctagtattggacatgctgtctttaaaatcaaatcttcagagggaagaaaaaaggcctttgggacatgttcctctcatctcattgtagttctcttgttctatggtccagccattagtatgtatcttcagcctccttcctctattacaaaagaccaacctaagttcatggctctcttctatggagtagtaactcctacattgaaccccttcatctataccctgaggaataaggatgtaaagggggcattaggtaaactattcaggaacatttttatatcaaagtaa

SEQ ID NO: 305 - DNA, 945 bp, Mus musculus
  MOR171-5
atggatgatatgacatcaggaaactattgcacagtgactgagttcttcttggcagggctctcagagaagccagaactccagctgcccctcttcttccttttcataggaatttatatgatcactgtagcagggaatttgggcatgatcatactgattgggctcagttcccacctgcacacacccatgtactatttcctcagcagtctgtccttcattgacttctgtcagtccacagtagttacccctaaaatgctagtgaactttgtgacagagaagaacatcatctcctaccctggatgcatgactcagctctacttcttcctcatatttgcaattgcggagtgttacattttagctgcaatggcatatgaccgctatgttgctatctgtaacccattgctttacaatgtaaccatgtcctatcaaatttacatttccctaatttcaggagtgtatattattggtgtgatctgtgcatcagctcacacaggcttcatggttagaattcgattctgcaaattagatgtgatcaaccactatttctgtgaccttcttcccctcttgaagcttgcatgctctaatacctatatcaatgaaatgttgattctattttttgggacactgaacatctttgtcccaatcctgaccattattacttcctacatcttcattattgccagcatcctccgcattcgctccactgaaggcaggtctaaagccttcagtacttgcagttctcacatcttggctgttgctgtcttctttggatctctagcattcatgtaccttcagccatcatcagtcagctccatggaccaagggaaagtgtcctctgtgttttataccattgttgttcccatgctgaaccccttgatctacagtctgaggaataaagatgttgctgttgccttgaaaaaaataattgaaagaaaaacatttatgtag

SEQ ID NO: 306 - DNA, 918 bp, Mus musculus
  MOR171-6
atggcagcaggaaaccgctgcacagtgactgagttcttcttagttgggctctcagagaagtcagaactccagctgccactcttcctgctcttcacaggaatctatctgatcactgtggcagggaacctgggcatgatcacactaattgggctcagttcccacctgcacacacccatgtactatttcctcagcagtctgtccttcattgacttctgtcagtccacagttgttattcctaaaatgctcatgagctttctgacagagaagaacatcatctcttactctggatgtatggctcagctctacttcttcctcatatttggtattgcagagtgctacacattagctgcaatggcatatgaccgatatgttgctatttgtaaccccttgctttacaatgtaaccatgtcttatcagatttacagttctctgatttcaggaatatatatttttgctgtgttctgttcatccttaaacactggcttcatgcttaggactcagttctgcaatttagatgtgattaaccactatttctgtgatcttctacccctcttgaatcttgcatcctctaatacgtttatcattgaaatattgattctagttattgctacactgaatgtctttatcccagtgctgaccattattacttcctacatcttcattattgccaccatcctctgcattcactccagggagggcaagttcaaggcttttagtacttgcagttcccacatctctgctgttgctatcttttatggttctggtgcattcacgtacttacagccctcatcactgaattctatgggccaagcaaaagtgtcctctgtgttttatactactgttgtacccatgctgaaccccttaatctacagcctgaggaataaaggatgtcagtatttcattgaagaaaatacttga

SEQ ID NO: 307 - DNA, 933 bp, Mus musculus
  MOR224-2
atgaggaattgcactttggtcactgaattcatcctggtgggaatcccatatacagctgggctggaaaggatgctctttgtcctctttttgtccttctacctgctcactcttcccggaaacctactcattctgatggccatcctgacttccgccagccttcacacacccatgtatttcttcttgggaaacctgtcagtgctcgatatctttttcccttctgtgagttccccaaagatgatgctctccctcactggacatagtcacacgatctcttaccagggctgtgcctctcagctcttcttctaccatttcctgggctgtgctgagtgcttcctgtacaccgtgatggcctatgaccgctttgcagccatctgtcaccctttgaggtacacagtcataatgagttcatgggtgtgtggctccatggctgtggccacctggatggggagctgtctgcacgcatctgtcctcacatttctcatcttcaagttaccctactgtggacccaatgaagtggataactttttctgcgacattccagtggtgctgcccctggcttgtgcagacacctctctggcacaagctgtaagtttcatcaacgtaggtcttgtcgcactggtatgcttcctccttatcctcatttcctactctcgcatcgtcatctccatattgaagatccgttcttctgaaggcaggcgcagagccttctccacctgcagtgcccacttgacatccattctgctcttctatggcccagtggtcctcatttacctcagacctgcctccagtccttggctggattcagtggttcaagtgttgaataatattgttactccttccctcaatcctttgatatattccttgagaaacaaagaggtaaaggtggctttgagaaaggcattgacacaagggatgcgtgttcctggggagtaa

SEQ ID NO: 308 - DNA, 948 bp, Mus musculus
  MOR162-1
atgaccccaggaatggtctcagaaaacaattcttctgtgaaggagtttatcctgttgggcttgacacagctgccagagctccagctgcctctcttcttcctcttcctgggaatctatgtgttctccatggtggggaacctgggcttgattgttctgattgtgttgaatcctcctctgcacacccccatgtactattttctcttcaacctttccttcacagatctctgctactcctctgtcataacccccaaaatgctggtgggttttgtgaagcagaacatcatctctcatgctgagtgcatgactcagctctttttctttgccttctttgttattgatgaatgttgtattttgacagcaatggcctatgacagatatgctgccatctgtaagcccctgctttataaggtcatcatgtctcatcaggtctgctttgtgctgatggtgggtgggtacacagtggggtttgtgggtgccacagcccacacagtgtgtatgctgaggctcaccttctgtgatggcaacatcatcaatcattacatgtgtgacataccccctctcttgaagctgtcctgcacaagcacctccatcaatgaactggtggttttcattgttgtgggtgtcagtataatagttcccagtctcaccgtctttatttcttataccttgatcctctccaatatcctccgcatccattctgcaaagggtaggtccaaggccctcagcacctgcagctctcacatgattgctgtttctctgttttttggatcatcatcattcatatactttaagtcttctcctgttgggtcagtggataaagataagatatccacagtgttctacactgtggtggttcccatgatgaatcccttcatctacagtttgaggaacaaggatgttcaaattgcactgaggaagactttgaagaaaaactgttcacttaagtag

SEQ ID NO: 309 - DNA, 936 bp, Mus musculus
  MOR171-7
atgttaaaaggaaatctttccgaagtgactgagttcatcctcgctgggttaacaaacaaaccagagctgcagctgcccctcttcttcctctttctagcaatctatgtggtcacagtggtggggaatctgggcatgatcactctgatactattcagttctcaactgcacacacccatgtacttttttctcagcagtctgtccttcattgacctctgccagtccactgtcattattcccaaaatgctggtgaactttgtgacagtgaagaacatcatctcctatcctgaatgcatgactcagctctacttttttgttacttttgctattgcagagtgtcacatgttagctgtaatggcatatgatcgctatgttgccatcggtaaccccttgctttacaatattatgatgtcctatcgagtctgttcttggatgatatttggagtatatattatggcttttattggtgccacatctcacacagtctgcatgttaagagtgcatttctgtaagactgatgtaataaatcattacttttgtgatatttatccactactggaactctcttgttctgatacctttattaatgaagtagtacttttatgtttcagtgtttttaacttcttgattccaactctgacaattctaagctcttacatcttcatcatagccagcatcctccggattaaatccactgaaggcaggtacaaagccttcagcacctgcagctcacacatctctgcagttgctatcttctttgggtctactgcatttatgtacttgcagccatcttcggtcaactctatggatcaagggaaagtgtcttctgtattttatagcattgttgtgcccatgctgaaccctttgatctacagcctgagaaataaggatgtcaaagttgctctaaataagttctttgaaagaaagtttttcttgtga

SEQ ID NO: 310 - DNA, 936 bp, Mus musculus
  MOR144-1
atgggaaaagaaaatcacacagaactatcacaattcctgctactgggtctctcagatgatcctaaattgcagcctattcttttcgggatattcttatttatgtacctggtcacagtgcttggtaacctgctcatcatcctggctgtcagttctgattcccatctccacaaccccatgtacttcttcctctccaacctctcatttgtagacatgtgtttcacttctaccactgtcccaaagatgctggtgaacatccagacaaagaacaaaaatatctcctacatgcagtgcctcactcaagtctatttttttatggtttttgctggaatggataatttcttactgactgtaatggcctttgaccgctttgtggctatttgtcaccccttaaactacacagtcatcatgaaccctcacttctgttgcttccttgtgctaatgtgctggattatcattttatcagtctccctgtttcatagtctattaatgaagcaattaactttttccatgggtactgaaatcccacatttcttctgtgagttggctcaaattctcagagtagcaagctctgatattctcatcaataatatcgcattatatgtggctactgccctgttatgtgtgtttcctgtcactggaattctcttctcttactcgcagattgtctcctccttattgaatatgtcttcagtagtcagcaagtatagagccttttccacctgtggatctcacctctgtgtggtctgtttgttttatggtacagcactgggggtttacctcagttcagctgggactgatgtttctcaaggaagcactatagcctcagtgatgtatactgtggtcactcctatgctcaacccattcatctacagcctgaggaataaagatgtgaagggggctctggtaagaatccttaaagtatattcttgtccctga

SEQ ID NO: 311 - DNA, 954 bp, Mus musculus
  MOR262-8
atggataaaaataaccagacgtttgtttctgaattccttcttttgggtcttgctggatacccaaagactgagatcatttactttgttattgttctggtcatgtatctagtgattctaactggcaatggtgttctgatcatagcaagcatctttgattcccgtcttcacacacccatgtacttcttcctgggcaacctctctttcctggatatctgctacacaacatcttctgtcccttcaacattggtgagcctaatttcaaagaaaagaaacatttctttctctggttgtgcagtgcagatgttctttggatttgcaatgggatcaacagaatgtttgctacttggcatgatggcttttgatcgctacgtggccatctgcaaccctctgagatactccatcatcatgagcaaagaagtgtatgtgttcatggcatccgcatcatggttctctggcagcatcaattcagttgtgcaaacatcccttgccatgcggctgcctttctgtgggaataatgtgattaatcattttacgtgtgaggtcttagctgtcctcaagctagcatgtgctgatatatctctcaatatcattaccatggtcatatcaaatatggccttcctggttcttccactactagtcatctttttctcctacctgttcatcctccacacaatcttgagaatgaactcagccacagggagacgaaaggcattctccacgtgctctgcccacctgactgtggtgatcatattttatggaactatcttctccatgtatgcaaaacccaaatctcaagatctgactgggcaagacaagttccaaacctcagataagatcatttctttattttacggagtagtgacccccatgctgaatccaatcatctacagcttgaggaataaagatgttaaagctgccgtaaaatacatactgaaacaaaagtacgttccttag

SEQ ID NO: 312 - DNA, 936 bp, Mus musculus
  MOR225-3
atggaatgtaagaggaacatatcagaatttcttcttatggggctgtcttctaagcggaacattgaggtgttttgcttccttttcttctcattctgttaccttgccatcttgtgtgggaatctgctgatccttatctccattagatgtagttctctgtttaaccaacccatgtactatttcctcagtcatttatcttctatggacattttctatacctcctgtgtgacacccaaactgattggagatcttctagtgagaagaaaaactatctcttatacaaactgcatgctacaggtctttgccatgcacttctttggaatgattgaaatcttaatcctaacagccatggcctttgaccgctgcgtggccatctgcaagcctctccactacatggtcatcatgagcagaagcaggtgccatatcctgatctgggcttcttgggttggtggtgctgcacactccttgtctcagttttgtttgctaatctgcttgcctttctgtggccccaatgaaatagatcactactactgtgacattttccctttgctgaaagttgcctgtaccgacaccaccatcactggtgtcctggtggttgccaattcaggactgattgctttagtaacctttgttgtcttgttcgggtcatatgtggttatactgttcacattaaggaattactctgcagaaggaagacacaaagccctttctacctgtgcatctcatatcactgtggttattttattctttggaccttccatctttgcttaccttagacctcctaccactttccctgaggacaaaatctttgctctattttacaccatcattgctcctatgttcaatcccctcatatatactttaagaaatacagagatgaaaaaggcaatgaaaaaggtttggtgtcaaaacatgttttcagaagagaaacatagttaa

SEQ ID NO: 313 - DNA, 945 bp, Mus musculus
  MOR13-4
atgctaggcttgaatggtactcccttccagccagccacactacagctgacaggcattcctgggatgaacataggccaagcttggattgccctgattttctgtttcctctatttcatctccattgcaggcaacctcagtatccttgctctggtcattcgggaacctcctctacaccaacccatgtactatttcctctctatgctctctctcaatgacttgggagtgtccctatctacacttcctaccgtacttgctaccttctgtttcaattaccgccatgttgattttgatgcctgtctggtacagatgttcttcattcacacgttttctttcatggaatcgggcatactacttgccatgagctttgatcgttttgtggctatctgtgacccactacgctattccactgtgcttaccaatagccgcatcctggctatgggtctgggtatccttgcaaaaagtttcactaccctctttcctttcccctttcttgtaaaaagattgcccttttgcaagggcaatgtgctacaccattcatattgcctccatccagatctgatgaaagtggcatgtggagacatccatgttaacaatatctatgggctctttgtggtaattttcacatatggtgtggactcagtttttatccttctgtcttatgcactgatcttgagagctgtgttggttattgcatcacacgaacagcgactcaaggcactcaacacctgtatatcacacatctgtgcagtactggcattttatgttcccataattgctgtctccatgatccaccgcttctggaaaagtgctccagctgttgttcatgttatgatgtccaatgtctatctattcgtacctcccatgctcaaccccatcatctatagcgtgaagaccaaggagatccgcaaagggatgctcaaagtcttccataaatctcagacctga

SEQ ID NO: 314 - DNA, 945 bp, Mus musculus
  MOR26-2
atggcaggcaatgctacacatcatattgcatctttcttcctggttggtattcctgggttggaaaactttcactgctggattggcatccctgtctgtcttctgtttgcactgaccctgctggggaacagcataatccttactactgtcaagctggagccaagtctccaccagcctatgtatttcttcctttgcatgctggcaatgaatgacatgtgtcttacctgttctacagctctgaagatgcttggtatcttctggtttgatgaacattggatcaactttgatgcctgtctaacacaaatgttttttatccatacactgtgcatcatggagtcagccatcctagtagccatggcatttgatcgctttgtggccatttgcatcccactgcactatacatcaatcttgacaatgcccatggtgattaaaataggtctagttggcctaggccgagctatacttatgatcatgccatgtccgcttctcattaaaaggctgttgtactacaccaaatatgtcatccatcatgcatactgtgagcacatggctgtggtgaagatggctagtggtaacactcaggtgaacagaatatatggaatcttggtggccctttcagtgacaatatttgaccttgggctcatagtcacatcctacataaaaattctccaggcagtatttcggctctcttcccagaatgcccgctctaaagccttgggcacctgtgttgcccatgtgtgcaccattcttgccttctatacaccagcattgttcagtttcctaactcatcgttttggcaagaatgtgcctgcaagtatccacataatctttgcaatcctttacctgttagtgtcccccactgtcaatcccttggtgtatggtgctaagactaaacagattcgtgaccgagtggtgagtcttcttttttctcaaaaacaaaaattttga

SEQ ID NO: 315 - DNA, 927 bp, Mus musculus
  MOR38-1
atgttaatcttcaaccactccagtttcatgactttcactcttttgggagtgcccggcttagaatcccaacacttgtggctctctgttccattcacttctatgctcttggccatcctcattggcaatggtgctatcctcttcttggttatcacagagcccacacttcacacaccaatgtatctgctcctggccctgctgatggtggctgacctcatctctactctagctcttgtgcccaaggtcctgtgcctcttctggtttgatgatcgagtcatagccatctatgcctgtttcacacagatgttcttcattcatggagcttcagtggtacgatcagccctacttgttgcaatggcctttgaccgctttgtggctgtgtgtgagccactacgctacaacacaattttaagccattctctagttggacgcctaggactggtggcacttgccaagggtgtcatccttatcctgcccatgcctcttctacttcaaaggctgactttctgtcacagggtcattccccacacatactgtgaccatatggctgtggtaaaaatggcctgtagtaacaccagaccaaatcggatttatgggctcttcgtgatcttgcttgtagtgggactcaatctgcttctaattggtttctcgtatgtcttcatcctgcagagtgtggtacgcctcaactctcgagatgccaccttcaaagccctcaatacatgctcagcccacctctttgttattctcatcacttatgtacctgcactgttttcatccatcacccaccgcatcggccaccatattccacctcatgctcacattattcttgccaatctctaccttctcataccttcggtgttcaacccaattatctacggtattaaaatgaaggagatacgggacagagtggccaaatgcttgtgcagatga

SEQ ID NO: 316 - DNA, 927 bp, Mus musculus
  MOR209-1
atgacaaattttacacatgtctcagagtttattctacttggattcaaaggaggtcctggtatacaaatgttgctatttctgatttttttatttttgtatgttatagcagtggtggggaattttggcatgattataattatcaggatggatgcacacctccatactcctatgtatgccttcctccagagcctttcctttctggacatctgctattcttccacaattgctcctagagctctgataaactgcatgaaacaggatcatacaatatcctttagtgggtgtgccacacaattcttttttttgtctctttttggtaccacagaagcatttctcctggctgctatggcctatgaccgcttcattgctatctgtaaccctcttctatactctgtgagtatgtcccactgggtctgtggattgttggtatcagggtcctattcatggggtgcagtgaatgctgtcacgcaaaccacaatgaccttcactttgactttttgtgggtccaatgagatcaatgacttcttctgtgacgtcccaccactcttatccctctcatgttcagacacttttataaaccagctggttcttcttgctttatgtggttccattattgtcagtaccttcttgactgtttttgtctcatacatctatatcatttcaacaatattgaagatccgcacagtgcagggacgccagaaagctttctccacgtgtgcctcccacttgattggtgtctgcttgttttttggtactgttttcttcatgtatgcacagcccagtgctgtctcctccatggagcagagcaaagtggtgtctatcttctacactattgtcattcccatgttgaaccccctcatatacagcctgaggaacaaagatgtcaaacaagcactgaagagaagcaagcagagattttgttcctga

SEQ ID NO: 317 - DNA, 936 bp, Mus musculus
  MOR233-12
atgcaaaaccagagttttgttactgagttcataatcttggggctttctcagaacccaatagttgagaaaatactgttttttgtacttttgttagtctatcttgcaactatagggggcaacataataattgttgtgaccatcatgtacagccctgcactgctgggatcccccatgtatttcttcttggcgttcttgtccttcctggatctatgtgtctcttccactgtcacacccaagatgattgtagacttcttctatgagaagaagaccatctcctttggctgttgcatgatgcaactgttttcagtccatttcttctcaggaacagaaatgattgtcctagcagccatggcctatgaccgctacgtggctatttgcaagcccttgcactatttttccatccttacccggaggctctgtagcattttggtagcaatatcctgggcagggggcttcttgcactctatcatacaagttatattcacattgcagctgcctttatgtggacccaatgtcattgatcattacacatgtgacttgtttccattgctgaagctggcctgcacggacactcatatatttgttcttttggtatttgcaaacagcggtgctatctgcatcattatcttctccttgttgcttgtttcctatggtgtcattttgttctctctgagagcccacagttctgaaggacgaaggaaagctctttccacctgtggagcccacgttactgttgtagttttgttccttgttccatgcatattaatatatgcacgggatacatctgcattttcctttgagaaacacacacttttatttgtcaatgtcctgacaccattgctaaatcctacagtttacactttcaggaataaggaaatgataaatgccatcagaaaaatgtgcaagagactgaaaatgatttttgttagattttaa

SEQ ID NO: 318 - DNA, 963 bp, Mus musculus
  MOR174-3
atggaagaggtaaactgtacctttatggcagagttcattcttcttggcttttctgatgtcccagagctggcaatctttctctttctcgtgtttcttgtcatttatggagtgacagtcatagcaaacctgggcatgactgtactgattcaggtcagctctcaacttcatactcctatgtacttttttctcagccacctgtcatttgtggatttctgctatgcttccatcattgtgccaaagatgttcactgatattatcaaccaggatcaagttatttcttacctggaatgcatgttacaattttatttattttgcacttttgctatcactgaagtcttcctattggctgtaatggcctatgaccgcttcgtggccatttgtaatccactattgtacactgtcatcatgtccccaaagctccgtcttgtactggtgtcctgttgctacctctatgcatcagtgtgttctctaattcacctgtgcttggcccttgagatcacatcatttaaatcaaatgtgattaaccacttcttttgtgatctgcctcctctcttaagtcttgcttgctctgatgttagtacaaatgagtttttcctgttcatcattgtcaatttcaatgagattcttactattgtgatcatcttcacctcctatttgtttatcctcatcacaatcctgaagatgcgctctgcagaggggagacgcaaagccttttctacctgtgcctcccatctcacagtcatcatggtcttccatggaacgatcctttttatttattgtcagcccaactctggtaacagtctagatgttgataaagtgactacagttttctatactgttatcattcccatgctgaaccccctgatctacagtctgaggaataaggatgtgaaagaggctcttagaaaaatgttaggctctaaaaagaattctttactagatttcttttttttttgtttttag

SEQ ID NO: 319 - DNA, 957 bp, Mus musculus
  MOR174-4
atgatactgtctgaaaaaaacaatagtgggattattttcaccctcttgggcttctcagattatcctgaccttaaagtccctctcttcttggtgtttctcgtcatttacagcatcactgtggtaggaaatattggtatgatcctcgtgatcagaattaatccccaactgcactcccctatgtacttcttcctcagccacctctcctttgtggatttctgctattcttcgatcattgctcccaagatgctggtgaaccttgttgcaaaagacataaccatttcatttgtagaatgcatagtacaatattttttattttgtgtctttgtagtaactgaagcctttttattagtggttatggcatatgaccgatttgtggctatctgtaaccctctgctctacacagtagccatgtcccagaaactctgtatcacactggtggtgggatcctacgcatgggggttcacatgttccttgacactgacgtgttctactgtgcaattatcttttcatggtgtcaataggatcgatcacttcttctgtgaactctcttcactgctagccctttcttcctctgatactctcatcagtcaattactgctgtttgtctttgccacatttaatgctgtcagcacattactccttattctgttgtcttacctgttcattgttgtcactgttcttaagatgcgttcagccagtgggcgtcgtaaggctttctccacctgtgcatcccatctggcagccatcactatcttccatggtaccattttattccttttttgtgttcccaactctaagaattccaggctcacagtcaaagtgggctctgtgttttacacagtggtgatccccatgcttaaccccataatctatagtctgagaaataaggatgtccaagatactattagaaaaataatgacccttatctcatgtgttaagaatgatagacacaattaa

SEQ ID NO: 320 - DNA, 954 bp, Mus musculus
  MOR164-2
atgaagatctacagaagaatgacacatggaaattactccctggtgacagaatttatcctggagggcttaactaatcggccagaactccaaatgcctctgttttttctgtttctaggaatctatgtggttactatagtggcaaatctgggcttaattacactgatttcattgaatacacaccttcacacacccatgtattatttcctctttaacctgtcatttgtagatatttgttactcttctgtctttacccccaaaatgctaattaattttgtagtagagaagaacaccatctcctatacaggctgcttgactcaactctacttcttctgctttttcgtcattacagaatgttatctactgactgcaatggcatatgaccgttatgttgctatttgcaagccactgctatataatgttatattatccccccggatctgtgctgtgttcgtgtttggggcatatgtgatgggatgctggggatccctggcccatacactttgcatggcaagactgaccttctgtgatgccaaccttgtcaatcattatctgtgtgacatcctccctgtgctccagctttcctgcaccagcacttacaacaatgaggttgtggtctttgttctggttggcatgaacattgtggtgtctaccagtaccacttttatctcctatggtttcatcattgctaacatcttacgcatcagctccacacaggacagggctaaagccttcaacacctgcagttctcacataatgactgtctcactcttctttggagcagcagcatttatgtacatgcaaccttctgatgtagagtctatggacaagggaaaagtggcctcggtattttacacaaatgtcgggcccatgctgaatcccttgatctacagcttaaggaataaggatgtcaaagttgctctgaagaaaactctgaagagaaaattattttcttga

SEQ ID NO: 321 - DNA, 927 bp, Mus musculus
  MOR171-8
atgaatcattcttcagtgactgattttatcctcgaaggactaacaaaacgcccagagcttcagctcccactgttcctcttgtttctgggcatacatgtgattacagtggtgggaaacttgggcatgatcctcttaatcaacattagttctcaacttcactctccaatgtattattttctcagtcacttatccttcattgacctctgctattcctctgtcattacaccaaagatgttggtgaactttgtatgtgcaaagaacacaatctcctttaaggagtgcatgactcagctttatttcttcctccttttagctatttcagaaggctacctgctgacagccatggcctatgaccgctatgttgccatctgtagcccactgctttataacactgtaatgtcccacaaggtctgttccataatgatggctgtggtatactcactgggcttctttggggctactgtccatacaacccgtatgacaatgttgtccttctgtgggtctcatattatcaggcactatttttgtgatattctacctttgttgactctgtcttgctcaagtacccatatcaacgaagtactgctgtttattattggtggagttaataccctagcacctacactggctgtcatcatctcttatgctttcattctaacaagcattcttcgcatccgctccaatgaaggacgttccaaagcatttggcacctgtagctcccacattatggctgtgggaatcttctttggatcaattactttcatgtatttcaagccaccttccagtaataatatggaacaagagaaggtgtcctctgtgttctacaccacagtgatcccaatgctaaatcccctcatatacagtctgaggaacaaggatgtaaagactgctctgaaaaagatggttggtagaaggcagttatcctga

SEQ ID NO: 322 - DNA, 951 bp, Mus musculus
  MOR34-7
atgcctggggtcaatacctccagcctgacaccaagatactttattctcaatgggattcctgggttggaagctgcacacatctggatctctctgccattcttcattatgtacctcattgctgtcacaggtaactgtggacttatctacctcatcagtcatgaggaggctctgcaccggcccatgtactactttctagccatgttgtctgctacagatatttctgggtgtaatacaattgtccccagtatgttatgcatcttttggttcagtgtcaaggagattgatttcaatgcctgccttgtacagatgtttttcatccacatgttaacaggcatggagtctggtgtgctcatgcttatggctctcgaccgctatgtggctatatgctatccattacgctatactaccatactcaccaacactatgattaccaagattggattggcagcacttgttagaagtgtgttactcatggtcccttttgctttcctgatcaagcgtcttccatactgtagaggaaacctcatccaacatacctattgtgatcacatggctgtggctaaactatcctgtggcaatattaagattaatgctatctatggtcttataattgctatatttattgggggttttgatatattctgtatctccatgtcttatgccatgattatccatgctgtggtgaagctatcttcggcagatgctcgccataaagccttcagtacctgtacatcacacatatgtgctattgttattacctatgtcccagcattcttcaacttctttactcatcgctttgggagaaccactataccccatcatatccacattattatagccaacctgtatctattgctacctcccaccttgaatccaattgtatatggagtaaagaccaagcagattcgtgaaggtgtgatcaaactgtttgctagacaaaaagttgtttga

SEQ ID NO: 323 - DNA, 942 bp, Mus musculus
  MOR31-11
atgtataacctaagctgttacaacccagcatccttcactcttgttggcatacctggtttggaaaagttccacatctggattggaattcccttttgtgtcatctatgttgtggctattgtaggcaactgcattctcctctacctgattgcagtggagcagagccttcacgagcccatgtttatattcctgtccatgctggccagcacagacctcatcttgtccactgccacagtgcccaaactgctcagtaacctttggtttgggtcccaagaaataaccttctctggttgtctcactcagatgtttttcctccacttcagctttgtagtggactctgctatcctgttagccatggcttttgatcgctatgtggctatctgcttgcccttgaggtatagcaccatcctgactccgcaggtgattgtcaagattatggtgagcatcattgtgaggagcttctcagtcatcctgccagatgttttcctgctgaggcggttgccattttgcaagacccgtgtcattcctcacacatactgtgagcatataggtgttgcaaggctttcctctgcagacatctctatcaacatctggtatgggttttctgttccgctcatgactgtaatctcagatgtcatcctgattgcagtatcctacatcttcatcctccgggcagtttttctactctcttcccagggtgcccgccaaaaggccttgagcacatgtggttcccatatctgtgtcattctcatgttctacacacctgccttcttctccatcctcgctcatcgctttgggcacagtgttcctcgtaatgttctcatcttatttgccaacttctatgtggccatccctcctgctctaaatccagttgtttatggagtgaagaccaagcagatccaggacaaattccttcttttcttctctttgagaaagacacaatga

SEQ ID NO: 324 - DNA, 942 bp, Mus musculus
  MOR4-1
atgactgctctctctgtcacaaactacactagttctaggtttgctctgactggtttccctggtttagaaatttattacttctggatatctgtcccattctttataatctatgtgacggtgttcctgggaaattgtatggtacttcatgtgattcggactgagctgagcctgcaccagcccatgttctatttcctggccatgttagccctcacagacctatgcatggggttgtccactgtgcacacggtaatgggtatcctttggggcttccttcaagagatcagccttgatgcctgcattgcacagtcttacttcattcacggtttgtccttcatggagtcctctgtcctcctcaccatgtcctttgaccgctacattgccatttgcaaccctctacgctattcctccatcctaaccaatgacaggatcctgaaaatcggagtggccatcttatgtaggagttctatgctcattcctccagttattatccgcctgaagttcttaaattactgcaggcctcatttcctctcccattctttctgcctgcaccaagacttaattagaatggcctgtggagatatccgcttcaatagcatctatggtctagctctggtgatcagcaacttgttagtggactcagtgctaatattaatatcatatattatgatcctgtacacagttctgtctattgcatccagggaggagagaatcaagtctttgcaaacatgtgtatctcacatctctgctgttttggttttctacatccccatcattggtctgaccatggttcaccgctttgggaagcatctctcaccattggttcatgtcctcatgggcaatgtctacatccttttcccacctttgatgaaccccattatatacagtatcaagactcaacagatacgagtgagaattcagcggttgttcttgaagggaacctaa

SEQ ID NO: 325 - DNA, 933 bp, Mus musculus
  MOR165-3
atggtcgtgacaaatggctctttggtaacagaattcattcttttggggttaacagataaccctgacctccaaatacccctctttttagttttcctagtaatgtatatgataactgcctttgggaatttgaccttgatcctcctaactgtgctgaactctcaccttcatacccctatgtactttttcctctttaacttgtccttcatagacctctgctattcttctgttgttacacccaaattgctgatgaactttgtactaaagaagaatattattggttttgcgggatgtatgactcaactctacttcttctgtttttttgttatctctgaatgttatgtcctgacagcaatggcctatgatcgctatgtggctatctgcaatccactcatgtataatgttaccatgtcccctaaagtctgttcctatcttatgcttggttcatatttgatgggattttctgatgccatgatccatactggatgcatcctgagactgactttctgtgatgggaacaccatcaatcactacttctgtgatcttctgcctttgatgcagctttcctgcacaagcacctatataaatgaggtagagattttcattgtagggggaaaagatatcactgtgcccagtattgtcatcatcatttcttatggcttcatcctctctaatattctccaaataaaatccactgggggcagatcaaaagccttcaacacctgcagttctcatataattgctgtttctctgttttttgggtcatgtgcatttatgtacttaaaacccccctcagctggatctttgaatgaggggaaagtatcttctgtcttctataccattgtggtccccatgatgaaccctttaatctacagtttgagaaataaagatgttaaacttgccctgagaaaaactttgagcaggagaaagttttaa

SEQ ID NO: 326 - DNA, 933 bp, Mus musculus
  MOR165-4
atggtcctgacaaatcactctttggtaacagaattcattctcttggggttaacagataaccctgaccttcaaatacccctcttcttagttttcctagtaatgtatatgataactgcctttgggaatttgaccttgatttttctaactgtgctgaactctcaccttcacacccctatgtacttttttctctttaacttgtccttcatagacctctgctattcttctgttgttacacccaaattgctgatgaactttgtactaaagaagaatattattggttttgcgggatgtatgactcaactctacttcttctgtttttttgttatctctgaatgttatgtcctgacagcaatggcttatgatcgctatgtggctatctgcaatccactcatgtataatgttaccatgtcccctaaagtctgttcctatcttatgcttggttcatatttgatgggattttctgatgccatgatccatactggatgcatcctgagactgactttctgtgatgggaacaccatcaatcactacttctgtgatcttctgcctttgatgcagctttcctgcacaagcacctatataaatgaggtagagattttcattgtagggggaaaagatatcactgtgcccagtattgttgtctttatttcttatggctttatcctttctaatatcctccaaataaagtccactgggggcagatataaagccttcaacacctgcagttctcatataattgctgtttccctgttttttgggtcatgtgcatttatgtacctgaaaccctcctctgttggatctttgaatgaagggaaagtgtcttctgtcttctataccattgtagtccccatgatgaaccctttaatctacagtttgagaaataaagatgttaaacttgccctgagaaaaactttgagcaggaaaaagttttag

SEQ ID NO: 327 - DNA, 936 bp, Mus musculus
  MOR239-1
atggaaaactacaccagggtgaaagaacttattttccttggcctgacccaaagtcaagaagtgagcatggtgctctttcttttccttctcctggtgtatgtgacaactctgctggggaaccttctcatcatggtcacagtgacctgtgagtctcgccttcacacccccatgtatttcttgctcaggaatttgtctgttgctgatatctgcttttcctccatcactgcccccaaggttctggtagaccttctctcagacagaaagaccatctctttcaatggctgtctcactcagatgttcttcttccaccttattgggggagtggatgtgttttctctgtctgtgatggctctagatcgatatgtggccatctctaagcccttgcactatgtgaccatcatgagcagagggcgttgcattgggttaatagtggcctcctgggtggggggctttgcccactccatagtgcagatttctctcttgctgacacttccattctgtggacccaatgttcttgatactttctactgtgatgtcccccaggtcatcaaacttgcctgcacagacatctttgttcttgagctgctgatgatttccaataatggcctggttgctactctgtggtttgtgttgttggtggtgtcatacacagtcattcttatgatgcttagatctcattcaggagagggcaggaagaaagccatctccacctgcacctcccacatcactgtggtcacactgcactttgtgccctgcatctatgtctatgccaggcccttcactgccctccccacggataaagccatctctgtcaccttcacagtcatctcccctctgctaaaccccttgatctatacactgaggaaccaggaaatgaagtcagccatgaggagacttagaaaaagacttgaaccttttgatagagaagagcaatag

SEQ ID NO: 328 - DNA, 945 bp, Mus musculus
  MOR231-8
atgggaaagagcaacaatgtgacagagtttatcctgctgggtcttacacaggatcctgctgggagaaaggcattgtttgtcatgtttttactcatttacattgtgaccatggtgggaaacctactcattgtggagacagtgatttccagcccctccttggactccccaatgtacttcttccttgcctctctgtctctcatggatgctgtttactcgactgccttctcacccaagttgattatggacttactctgcaatagaagaacaatttccgtttcagcttgcattggccagctctttgtagagcacttatttggtggtgctgaggtcttccttttggtcttcatggcctacgatcgctatgtggctatctgtaaacccctgcattatatgaccatcatgaatcgtcaggtttgcattctcctattggtggcagcctgtgctggaggttttggtcactctttggttcaagtcatcgttgtttgctacctccctttttgtggtccaaataccattgatcactttatctgtgacatgtacccattactgggcttagcatgtactgacacttacttaattgggctcactgtggttgccaatggtggagcaatttgtatgacggtctttatcctcctccttgtctcctatggaatcattctaaactctcttaagtctcatagtgaggaagggaggcgcaaagccctgtccacctgcagctcccacatcatagtggttgtcctcttttttgttccctgtattttcatgtatgttagacctgtctccaactttcctattgataaatccctaactgtagtttatacagttatcacccccatgttgaatcctttaatatatactctgagaaatgcggagatgaaaaacagtatgaaaaaactttggtgtgaaagattaactatggaaagattgagaatgttccctcactga

SEQ ID NO: 329 - DNA, 939 bp, Mus musculus
  MOR256-7
atggctgtaaccaatgaaagccacccaaaagaattcatcctactgggctttgctaaccatccttggctggaactccctctttttgttactcttctgataacatatcccatggctttgatggggaacatcgccatcattctggtgtcaaccttagaccctcgtctccacagccccatgtactttttcctcacaaatctctcctttctggacatgtgctacaccacaagcattgtgcctcagatgctgtttaacctggggagctccagaaaaactattacttacattggatgtgttgttcaactttatgtcttccacataatgggaggcacagaatgtctacttttggctattatgtcctttgatcgatatgtggctatctgcaaacctctccactacaccctcatcatgaaccaaagagtgtgcattttgttagtgtctattatgtggctgactggcgtgatctttgctttttcagaggctacacttacattacaattgccattgtgtggcatacataaactggatcatttattgtgtgaaatcccagttctcataaaaactgcctgtggtgaaaaggagtctaatgagctagcactttctgtggtatgcatttttatactggctgttcctctgtgcttaattcttgcttcttatgttaatattgggtgtgcagtacttagaattaaatcttctgaaggaaggaaaaaagcctttgggacatgttcttcccatcttgttgtagtttctttattctatggtccagccattagcatgtaccttcagccttcttcatccattacaagggaccaacccaagttcatggctctcttttatgcagtgataactcctacactgaatccattcatctataccctaagaaacaaggatgtaaagggtgccttaaaaaaactcctgagaagcattttcagttcaaaatga

SEQ ID NO: 330 - DNA, 942 bp, Mus musculus
  MOR170-6
atgatgcaaataactatggaaaataaatcttcagtgtcagaatttattcttatgggattgacagaccaacctgagctccagctgcccttatttgttctgttcttgatgaactacacagctactgtgatgggaaacttaactttaatgaatctcatttgcctaaactcaaaccttcatactcctatgtacttctttctctttaatctgtccttcattgatttctgttattcgatggtctttacacccaaaatgttgatgagttttattttagagaagaataccatctcttttggaggatgcatggctcagttatttttcttcctattttttgtgaactctgagagttatgtgttgacagccatggcctatgatcgctatgtggctatttgtaaaccactaacatacaaagttattatgtcccctaagatctgttgtctgttaatatttagttcttacttgatggggtttgctagtgccatggctcacacagggtgtatgatcaggcttagcttttgtgattctaacatcatcaaccactacatgtgtgacatcttccctcttctcccactctcctgcagtagcacctatgttaatgagcttatgagttcagttgtggtaggttcagctatcattttatgctgcctcattattttaatctcttatgctatgatacttttcaatattattcatatgtcatcaggtaaaggttggtccaaagccttgggcacatgtgggtctcacatcattactgttagtctcttttatggatctgggctgcttgcttatgtcaaaccatcatctgctaagactgtgggccagggaaaatttttctctgtgttttacactttattggtgcccatgttgaaccctcttatttatagcctcagaaacaaggatgtcaaacttgctgtgaagaaaacctggaaaagaatcacaagctga

SEQ ID NO: 331 - DNA, 933 bp, Mus musculus
  MOR165-5
atggccctggaaaatgcttccttggtcactgagtttatcttgatggggttaacaaacagacctgacctacaaatacccctgttcctactctttctggtgatgtacgtgatagctacattggggaatttagctttgatcatgctgattattctgaattctcaccttcacactcctatgtattttttcctccttaacttgtcctgcatagaccttttttattgttcagtcattacacctaaaatgctgatgaactttgtactaaagaaaaatgttatttcttatgagggatgcatggcccagttctatttctttgccttttttgcaatttctgaatgttatgtgctgacaacaatggcctatgatcgctatgtggccatttgcaatccactcttgtacaacattgtaatgtctcctaagttgtgttcttatcttatgatgggtacatatttgatggggttttctggtgccatgatccatactggatgtatcctaagactgacattctgtgataaaaacaccatcaatcactatttctgtgacatcctccctttgctccagatctcctgcaccagtacctatgttaatgagatagagttgttcattgtagcaggaaaggatattattgttcccactgtaatcatctttacctcttacggctttatcctctccagcatcctcaaaataagctccacagcaggaatgtccaaagccttcagcacatgtagctctcacataatcgctctttgtctgttctttggatcatgtacatttatgtatctaaaaccctcctcagttgagtctatggaccaggggaaaatatcttctgtcttttataacattgttgtccccctgatgaatccattaatctatagccttaggaacaaagatgttaaaattgctataaaaaaaactataaccataggaaagttttaa

SEQ ID NO: 332 - DNA, 933 bp, Mus musculus
  MOR167-1
atgggttttgaaaatggctcttcagtgactgaattcattctggtgggattaaccaaggagtctgatctccagtgccccctcttcatcctgtttctaatgatgtatgtggtcactgtgctgggaaatcagggtttgattagcttaattggactgaactctcatctccacactccaatgtacttttttctctttaacttgtcctttgttgacctctggtactcttctgttttcacacccaaaatgctggagagctttatatcagagaagaatactatttcttacagaggatgcatggcacagcttttctttttctgttttttctccatctctgagtgttacattttgacctcaatggcctatgatcgctatgtggccatttgtaacccactcttgtataatattgtcatgtctcctaaactatgtttgatccttatgtttagttcatacatgatggcattttctggtgccatggctcacacgggatgcatgctgagactgaccttctgtgatgctaacaccatcaaccactacttctgtgacatcctccctgtgatgcagctctcctgcaccagcacctatgtcaatgaactggaggtatttgttgttgtgggcatcaacatcattgtgcccaccatcaccatctttatctcttatggttttatcatctcaagtatttttcgtatcagctccaaggagggcaggtccaaagccttcagcacctgcagctcccacataattgcagtttctctgttctttggatcaggtgcatttatgtatctcaaaccatcttctgctgagtcaatgaatgaaggcaaaatctcctctatcttttataccaatacagttcctctgctgaatcccttaatttacagcttgaggaacaaagatgttaaagatgccttgataaagaccctgagtaagagaaagcgttaa

SEQ ID NO: 333 - DNA, 936 bp, Mus musculus
  MOR167-2
atggctttcggaaataggtcttttgtgactgaattcatcttgattggcttaacagaccagcccaatctccaactccctctgttcttcttgttccttgtaatgtatatagtaactatgaccgggaatttgggtttggtaattctaattggactgaattctcaccttcacaccccgatgtacttttttctctttaacttgtctttgatagacctctgttactcttcagtgtttacacccaaaatgctgttgaacttcatattaaataagaatattatctcttatacggggtgtatgacccaactctatttttattcattctttgttatttctgagtgttatgtgttaatgtcaatggcctatgatcgctatgtagccatctgtaatccactcttatataatattgctatgacacctaaaatatgttcctatcttatgcttggttcatacttgatggcattttctggtgccatggctcacacaggatgtatgttaagattgaccttctgtgatgcaaacaccatcaatcactacttctgtgacatcctccctgtgatgcagctctcctgcaccagcacctatgtcaatgaactggaagttttcattgtcgtgggcatcaatatccttgtgcccagcatcaccatttttatctcttatgggttcattctctccagcattttccacatcaactccaatgagggcaggtccaaggccttcagcacctgcagttcccacataattgctgtttctctcttctttggatcaggtgcatttatgtatcttaaaccctcctcagctgggtctatggatgaaggaaaaatctcttctgtcttttataccaatgtggttcccatgatgaaccccttaatctatagcttgaggaacaaagatgttaaagttgccctgaggataaccttgagtaggtggaaattattgtag

SEQ ID NO: 334 - DNA, 930 bp, Mus musculus
  MOR169-1
atggactcagtaaatgtctccttggtgactgaattccttctagtaggattaacacatcagcctgatctccaaatacccctgttccttctgtttctagcaatgtatctagtcactgcattgggaaatttgggtttgattattctagttttgctaaattcacatcttcacacacccatgtactttttcctctttaacttgtcctttatagatttttgttattcttctgtgttcgctccaaaaatgttgatgaacttcatattaagacagaatgccatttcctatatgcaatgtatgactcagctctacttcttttttttttttgttgtttctgaatgctttgtgctgacgtcaatggcttatgatcgatatgtggctatctgtaatccatttttatataatgtgatgatttctcctcaagtgtgtttaaacctaatgattggttcctatttgatggcattttctgaggctgtagttctcactgtgtgtatgctgacattgactttctgtgatggaaacatcaaccactacttctgtgacattcttgctctgtttcagctctcctgctcaagcacctatgttaataagcttgtagcttatgtcatagtggtcatcaacatacttttttctactcctgccatctttatctcttatggttttatcctctccagcatcttccgcataagttcctctaagggtaggtccaaagccttcagcacctgcagctcccacataatcgctgtttctctgttctttggttcaagagcatttgtgtatttcaaaccctcctcacctgggtctatggaatgggcaaaaatctcttctgttttttataccaatgtagttcctatgatgaatccattaatctacagcttgaaaaacaaagatgttaaaattgccctaagaaaatctttggcaaggtggaagatttga

SEQ ID NO: 335 - DNA, 933 bp, Mus musculus
  MOR167-3
atggcccctgcaaatgtgtccttggtgactgaattcattctggtaggtttaacaaaccagcctgatcttcaaatacctctgttctttgtgtttctaataatgtatattgttactgcattaggaaatttgtgtttgataattcttattgtactaaattcacaccttcacacccctatgtactttttcctctttaacttgtccttcatagacctctgctactctactgtgttcactccaaaaatgctgatgaactttatactgagcaagaatgcaatttcttacatgggatgtttaacccagctatatttcttctgcttttttgtcatttctgagtgttatgtgttgacttcaatggcttatgatcgctatgtggccatctgtaatccactcttgtacacggttgccatgtcccctaaattgtgtttgaaccttatgcttggtacatatgcaatggcattttctggtgccatggctcacacaggatgcatgctgagactgaccttctgtgatgctaacaccatcaaccactacttctgtgacatcctccctgtgatgcagctctcctgcaccagcacctatgtcaatgagcttgtagttttcattgttgtgggcatcaatatcattgtgccaagcatcactatcttcatctcttatggcttcatcctctccagcatttttcacatcaagtccaatgaaggcaggtccaaggccttcagcacctgcagttcccacataattgcagtttgtctcttctttggatcaggtgcatttatgtatctcaaaccatcttcttcttcatctatggatcaagggaaaacctcttctgtgttttatacaaatgtggttcccatgatgaatcccttaatctacagtttaaggaacaaagatgtcaagatagccctgagaaaaaccctgagcagatggaaattttga

SEQ ID NO: 336 - DNA, 933 bp, Mus musculus
  MOR244-2
atggaaaaggctgtcctcatcaacgaaacttcagtgatgtcatttcggctcacaggtttatctacaaatccattagtacaaatggctgtttttttcatattcctcattttctatgtcctgacactggttggtaacatcctcattgtcataacaatcatatatgaccgccggctccatactcccatgtatttcttcctcagcaatctgtcctttattgatgtctgccattccactgtcactgtcccaaagatgctgagtgacaccttctcagaagaaaagctcatctcctttgatgcctgtgtggtccagatgttcttcctgcacctctttgcctgcacagagatcttccttcttactgtcatggcctatgatcgctatgtggctatttgtaaacctttgcagtatatgacaataatgaactggaaggtgtgtatgatgctggcagcagccctatggacaggggggaccatccattccatatctctcacctcactcaccatcaagctgccctactgtggtcctgatgagattgacaacttcttctgtgatgtacctcaagtgatcaaactggcttgcactgacacccacatcattgagattctcattgtctccaacagtgggctgatctctgtggtatgttttgtggttcttgtagtgtcctatgcagtcatccttgtgagtctgaggcaacagatctctgacggcaagaggaaagccttgtccacctgtgcagcccatctcaccgtggtcactctgtttctgggacactgtatcttcatctactcacgcccatccaccagccttcctgaggacaaggttgtgtctgtgtttttcactgctgttacccctctactgaatcccattatctacacccttaggaatgaggacatgaagagtgccttaaacaagttaattaagagaagagaaaagtga

SEQ ID NO: 337 - DNA, 927 bp, Mus musculus
  MOR244-3
atgggagctctaaatcaaacaagagtgactgaatttatcttcctgggcctcactgacaactgggtgttggagattctgtttttcgtaccatttacagtcacttatatgttaacacttttggggaacttcctcattgttgttaccatagtcttcacgccacgtctccacaatcccatgtacttctttctgagcaatctgtccttcattgacatctgccactcatctgtcaccgtgcccaagatgcttgagggtttgcttttagagaggaagaccatttcctttgacaattgcattgcacagctcttcttcctacatctctttgcttgttctgagatctttctgctgacgattatggcgtatgatcgttatgtggctatctgcatcccattgcattactccaatgtgatgaacatgaaggtctgtgtacagcttgtctttgcactctggctggggggcactattcattcacttgtgcagaccttcttgactattcgtctaccctactgtggcccaaacattatcgatagctacttctgtgacgtacctcctgtcatcaagctggcctgcacagatacataccttacagggattctgatcgtgtccaatagtggaaccatctccctcgtatgttttctagccttggtcacttcttacacagtcatcctgttttctcttcgaaaaaagtctgcagaaggtcgtcggaaagccctgtccacctgctcagcccacttcatggtggtcaccctgttctttgggccatgtatcttcctctacactcggccagatagcagcttctccatcgacaaggtggtatcggttttctacacagtggtcacccctttgttgaatcctctcatttacactttgaggaatgaggaagtgaaaactgccatgaagcatctcaggcagagacgaatttgctcatga

SEQ ID NO: 338 - DNA, 945 bp, Mus musculus
  MOR163-1
atgtctcagaagagaatggctccaagaaatagctcctctgtgactgaatttatccttgtgggattttcaaaccaaccagctctccagctgcctctcttcttcgtcttcttaggtatctatgtgctgactgttataggcaatttgggactgatcaccttaattgggttgaattccagtcttcatactccaatgtactttttcctcttcaacttgtcctttatagatttctgttattcctgtgtgttcacgccaaaaatgttgagtgattttgtctcagaaaacattatctcctacatgggatgcatgactcaactgtttttcttctgtttctttgtcaattctgaatgctacgtgctggtgtcaatggcctatgatcgctatgtggccatttgcaatcctctgctgtacacagttaccatgtctcctcaggtctgcactctgctgatgttttgttcatatgtgatagggtttgctggagccatggcccatactggaagcatgctgacacttactttctgtgattccaatatgatccaccattatctctgtgaagttcttccccttttacagctctcctgcaccagtacctatgccaacgagcttgtgttttttattgttgttggagtagtcatcacagcatccagcatcagcatctttatctcttatgcattgattctctccaacattcttaagattccttctgctgaaggtagatccaaagcctttggcacatgtggttcccatgtagttgctgttgctctgttttttgggtcaggggcattcacctatttaacaacctctttccctggttcaatggaagagggaaggtttgcttcagtattttataccaatgtggttcccatgcttaacccactgatctatagtttgaggaataaagacgttaaacttgccctaaataaaaccttgaagagagtgctcttctga

SEQ ID NO: 339 - DNA, 951 bp, Mus musculus
  MOR211-1
atggccaagaataacattaccacagtaacggaattcatcctaataggctttaatgaccaccccaagtgggagattccactattgctggtatttcttagcttttatcttgtcaccatgctgggaaatttgggcatggtcattcttatccatgtagatgtccaactccacatcccaatgtacttctttctgagccatctctctgtgttggatgcctgctatacttcagtcatcacccctcagatactggcaacgctggctacaggtaaaacagtcatttcctatagatgttgtgctgcccagttcttcttcttcactatctgtgcagctacagaatgtttcctgctgtctgtgatggcctatgatcgctatgttgctattagcaatccactgctctacactgtggccatgggccctagaaaatgttggagtttagtagtaggagcatatatctgtggagtgtgtggggccattctgcgtaccacatgcaccttctctctctccttctgtgaaaataatcagatcaatttcttcttttgtgacctcccacctctgctgaagctggcctgtagtgacacaacaaatattgaaattatcattgtcttctttgggaattttgtaattttggccaatgccttagtcatcctcatttcctacctgctcatcatcaaagctgtcatgagaatgaagtcttcaggtagaagagcaaagactttctcaacatgtgtctcccacctcactgctgtggctcttttatttgggacactcatctttatgtacatacgtagtggttcaaaaaaatccctggatgaagataaagttgtgtctgtcttctacactgtggtcattcccatgctgaacccactaatctacagcctaaggaacaaggatgtcaaggctgcattcaagaaggtgactggtaaatgccaggtttcccaatgcacacaacactga

SEQ ID NO: 340 - DNA, 945 bp, Mus musculus
  MOR211-2
atggacaataacaacctcacaacagtaactgaattcattcttgtgggctttactgaccatccagagtgggaggttcctcttttcctggtatttctctgcttctatctggtcaccatcctagggaacttgggcatggtcattcttatccagatggatgtccagcttcagagcccaatgtatttcttcctgagtcatctctctgtgttggatgcctgctacaccagtgtcatcacccctcagatcctggccatgctggccacaggtaaaacagtcatctcctataatcattgtgctgcccagttcttctttttcaccttctgtgcaagtacagaatgtttcctgttggcagtgatgtcctatgatcgctatgttgctattagcaatcctctgctctacactgtggccatgagtcctaaaaaatgctggagtttggtactggtggcctatgtatgtgggttatctgggtccattcaaagaaccacatgtaccttctctctttccttctgtgaagataataagatcaacttcttcttttgtgaccttccacccctcctgaagctggcctgcagtgatacaacaaatgctgagattataattgttttgtttgggaactttgtcatcttggtgaatgctttagtcatactcacttcctacctgcttatcatcaagacagtcatgaggataaagtcttcaggtggcagaggtaaaaccttctccacatgtgtctcccacctcactgctgtggctcttttttttgggaccctcaccttcatgtatataagaagtggttcagggaaatcgccagaggaagataaagtagtgtctgtcttctatactgtgatcatccctatgttgaaccctctgatctacagcttgagaaataaagatgttaaagcaggcttcagaaagctcactagcaggctacaggtgtcccagagtgtataa

SEQ ID NO: 341 - DNA, 933 bp, Mus musculus
  MOR110-1
atgaagaaccagtcaggagagttagagttcattttacttggactgacagatgaccctcagctacaaattctgattttcctgtttctgtttttcaattacattttgagcatgatggggaacttaacgatcatcctcctcaccctgttggatccccacctcaagactcctatgtatttcttcctccggaatttctccttcatagaaattgcattcaccacagtgtgcattcccaggttcctgataagcattctctcaggagatagaacaatttcctacaatgcttgtgcagctcaattattttttgtattcctactagggtccacagagttctacctcctggctgccatgtcctatgatcgctatgtagccatctgcagaccactgcattaccccatcatcatgaatagcaaagtgtgccatctactggtcctcagctcctgggtaactggattcttaatcatcttccctcctttgctcttggggctcaaactggatttctgtacttctggagcaatggaccattttctttgtgacccttctcctgtcctgcagctgtcttgtacagacacacagttaatagaattgatgacttttgtcttagctattatgacacttatcatcactttgatcttagttatcctttcctacacactcatcatcaaaaccatcctaaagttcccttcagctcagcaacggagaaaggccttttccacctgctcctcacacatggttgttgtctccattacttatggaagttgtattttcatgtatgttaaaacatcagcgaaagagagagtgactttaaataaaggtgtagctgtgctcaacacctccgtggctcccttgctaaaccctttcatttacaccctaaggaaccagcaggtgaaggatgctttcaaacatatgcttcatagattttgtacaaagcagtga

SEQ ID NO: 342 - DNA, 921 bp, Mus musculus
  MOR234-2
atgagcaatgtcacagaattcattctcctgggcctgacccaagacccagatctgcagaaactcttatttattgtgtgcttaataatctatttgatcacactggcaggtaacatgctcatctcagtcaccattttcatcagcccagccctggccactcccatgtacttctttctgtcctacttgtccatcatagatggtttctactcttcttccatagcacccaaaatgatctatgacctaatctctgagaagagcaccatatccttcaatggctgcatgactcagctttttgctgagcacttttttgctgctgatgaaatcatcttgttgattgccatggcctatgatcgctatgtagctatctgcaagcccttacactacatgaccatcatgagccaacctctgtgtgtattcctggtgggtgccgctgtaatcttaggattcattcacggagcaatacaaactttatttatggcccagttacccttctgtggtcccaataccatcaaccattttatgtgtgatttaataccactcctggagttggcctgcactgacactcacactctgggacccctgatcgctgccaacagcgggtcactgtgtttgcttactttctctatgctggttgcttcctatgtggtcattcttcgctccctgagaaatcacagtgcagaagggcgtcgcaaagccctgtctacctgtgcctctcatgtcaccgttgttgtcttattctttgttccttgttcatacctgtacctaaggcccatgacctccttccccactgacaaagctgtaactgtgttttgcaccctagtgacacctatgctgaaccctctgatctataccctcagaaatgaggaggtcaaaagggttatgaagaagctctggggtcgaatgaggaaagctggtgacatgtaa

SEQ ID NO: 343 - DNA, 918 bp, Mus musculus
  MOR227-5
atggtccatgaaaataacgtaactgagttaattttcactggccttttccaggatccagaggttcagaaggtgtgctttgtgctgttccttcctgtgtacctggccacattgctgggcaacggtcttatttttgtgacagtcagcatcagtaagactttacattctcccatgtacttcttcctcagttccttgtccctggtggagatctgctactcctctacagttgcccctaagttcatcactgacttacttgctaaggttaaaaccatctctctgaagggctgtctaactcagatattcttcttccatttctttggtgttgttgaaatcattttgctagtgatgatggcctacgatcgctatgtggccatctgcaaacctcttcattacatgatcatcatgagtcgtcaagtgtgtcacatgttggtggctggctcctggctggggggcctcattcactccataatccagatcatcatcactattccattgcccttctgtggtcccaatgtgattgaccactacttctgtgacctgcatccattacttaagcttgcttgcagtgacacctttatggagaggtttattgtaatggctaacagtggtctattctctataatctctctcttcatcttggtgtcctcctatgctgtcatcctaatcagcttgaggaagcgttctgcagaggggagacggaaggccctctctacctgtgcctcacacatcacagtggtcatcctgtactttggacctggtgcatttatttatatgagaccctcctctgccttcactgaagacaagcttgtgtctgtgttctacactgtcatcactcccatgctgaaccccattgtctatactctaaggaatacagaaatgaaaaatgctatacgtatgttctggagccaaaaagacaagtga

SEQ ID NO: 344 - DNA, 945 bp, Mus musculus
  MOR231-9
atgggagaaagaaacaatgtcacagaatttgtccttttggggctcactcaggatcctgcaggtcaaaaagtattatttgtcatgtttttgctcatctacattgtgacaatggttggcaacctgctcattgtgctgacggtgattgccagcccctctttgggctccccaatgtacttcttccttgcctgtctttcattcctggacattgtttattcaacttccatctcaccaaagttgattatggacttgctgtgtgatgaaaagtctatctccttcacagcttgcatgagccagctctttatagagcatttatttggaggcaccgagattgtcattctggtggcaatggcctatgatcgctatgtggcaatctgtaaaccactgcactatttgaccatcatgaatcgaaaggtttgtatcattttgttgggattttcctgggttggaggttttacacactccatgattcaaattctctttgttttcaaccttcctttctgtggtccaaatattattgaccactttatgtgtgacatgtccccattattgggacttgtgtgcactgacacctacttcattggtcttaccctcattgccaaaggtggagccatgtgcattgtagtctttatccttctcatagtgtcttatggaatcatccttagatctctcaagaattatagtcaggaagggaggcgcaaagccctgtctacttgcagctcccacatcatggtagttacacttttttttgttccctgcattttcatgtatgccagacctgtttataacttttctagtgacaaatacattactgtattttatacagttttcactcccatgttaaatcctttaatctacactttaagaaattcagagatgaaaaattctatgcaaaaactctggtgtacactgttaactatggatagaataagattgtcttgttattga

SEQ ID NO: 345 - DNA, 924 bp, Mus musculus
  MOR231-10
atgggacagaataacaatgttacagagtttatcctcctgggtctcactcaggatcctgctgggcaaaaagtattgtttgtcatgtttttactcatctacattgtgaaaatagtgggcaacctgctcattgtggggacagtgattgccagcccctccttgggctccccaatgtactttttccttgcctttctttcactcatggatgctgtttattctactgccatcttgcccaagttgcttacagatttactttgtgataagaagaccatctccttcacagcttgtctggttcagctttttgtggagcacttatttggtggttctgaggtcttcattttggtggtgatggcctatgatcactatgtggccatctgtaagccactgcactatctgaccataatgaaacggcaggtttgcattctcttggtggtggtgtcctgggctggaggatttgtacatgctctgcttcaagctatctctgtgtatttacttcctttttgtggacccaatgtcattgaccattttgcttgtgacatatacccattgttaggacttgcatgtactgacacttacttccttggactcactgtagttagcagttatggagcaatgtctatagtggcctttatcctccttcttgtctcctatggaatcattctaaactctcttaagactcacagtcaggaagggaggcgcaaagccctgtccacctgcagctcccacatcatggtggttgtcctcttttttgttccctgtattttcatgtatgttagacctgtctccaactttccaattgataaatatattactgtattttatacagtttttactcccatgttgaaccctttaatatataccttgagaaacatggagattaaaaattgtatggcaaagctgtggagtaaaatgttcactaaagcataa

SEQ ID NO: 346 - DNA, 948 bp, Mus musculus
  MOR231-11
atgggacagagaaacaatgtcacagaatttatcctcctgggactcactcaggatccagctggacagaaagcattgtttgtcatgtttttactcatctacatcgtgacaatggtgggcaacctgcttattgtggccacagtgattgccagtccctccttgggctccccaatgtacttcttccttgcttatttgtcaatcatggatgctgtttattccacttccacatcacccaagttgattatggacttactctccgacaaaaagactatctcattctcagcttgcatgggccaactctttattgagcacttatttggtggtgctgaggtcttcctgctggtggtgatggcctacgatcgctatgtggccatctgtaagccccttcactatttgaccatcatgaaccggcagatttgcattcttctgttggtgatagcctgggttggtgggtttgtacattctgtgattcaacttgcttttgtgtctactctccctttctgtggacccaatgtcattgatcactttatctgtgacatgtacccactcttgacacttgcatgcagtgacacttacttcattggacttactgtggttgcgaatggtggagcaatctgtatggtcattttaattcttcttctaatctcttatgtattcatcctaaactctcttaaaaactacagtcaggaagggagacgcaaagccttatccacttgcagctcccacatcactgtggtggtgctcttttttgtcccctgcatttttatttatgttaggccagtgtctaactttcccattgataagtcgataagtgtagtttttacagttattactcccatgctgaaccctttaatatatactctgagaaattcagagatgaaaattgcaatgcaaaaactctggtgtaaaacagcaactacaggcagagtaagagtgcactccccacactga

SEQ ID NO: 347 - DNA, 918 bp, Mus musculus
  MOR237-1
atggagaatgcaaacaatgtcactgaattcattcttgtgagcattaccaagattccagagctgagaatactattctctgctttgtttcttatcatgtatgtggccacacttttgggaaacctactgatcattgtaactgtaacagtgagtccgaatctgaggtctcccatgtattttttcctcatttccttgtcccttttggatgtcatctactcttcagtcactgctcccaagttgattgtagactctctttctgagaacactaccatctccctagaaggctgcatgacccaactctttgctgaacacttttttggtggggtagagatcatccttctcatcgtgatggcctatgacagctatgtggctatctgtaaacctctacactacacgaccattgttagtccccgagtatgctggctgatggtgggaggtgcttgggtgggaggatttgctcacggaaccattcagctgctctttatgtatcaaatacctttctgtggtcccaatgtcattgatcatgtgatctgtgacttgttcccgttgttgcaactagcctgcatggacacccatatcctagctctcttagtcattctcaacagtggggtaatgtgtgtgaccattttccttattctcatcacttcctatgtagtaatcctctgttccctaaagtcttccagctctgaaggaaggcggaaagctctctccacatgtagctctcacttcacagtggttgtgttgttctttgtaccttgtattatcttgtacatgaggcctgtggtcacttatcctatagataatgcaatggctctgtgtgctacaatttttgaaccaatgttaaatcctttaatctatagcttgagaaatgcagaagtgaaacatgctctgaggaaactgtggatgaaaaggggaccttga

SEQ ID NO: 348 - DNA, 924 bp, Mus musculus
  MOR231-12
atgggagagaaaagtaatatcacagaatttattctcctgggtctcactcaggatcctgctgggagaaaaatattgtttttcatctttttactcatctacattgtaaccatggtgggcaacctgcttattgtggtgacagtcattaccagcccctccttgggttctccaatgtacttcttccttgcctctctatcactcttggatgctcttttctccactgccatctcacccaagttgattgtggatttattctgtgatcaaaaaaccatctcttttacagcttgcataagccagctctttatagagcatttatttggtggtgttgatattgttattctggtggcaatggcttatgatcgctatgtggcaatctgtaagccactgcactatttggccatcatgaatcgaagggtttgcatcactttgttgataattgcctggactggtggttttacacactctctgattcaaattgtctttgtatacaaccttcctttttgtggtcctaatgttattgatcattttatttgtgacatgtctccattattggtacttgcatgcacagacacctacttcattggcctcactgttattgctaatggtggagccatgtgtattgtgatcttcaccctcctcctaggctcctatggaatcatcctaaaatctcttaagactcatagtcaggaagggaggcgcaaagccctctccacatgcagctcccacatcttggtagttatcctcttctttgttccatgtatttttatgtatgcccgaccagtttacaactttcccattgataaatgtattactgttttttatacaattatcactcccatgttgaatcctttaatatataccttaagaaattcagagatgaaaacttgtatgaaaaagctctggtgcaaaattctacctgcagattaa

SEQ ID NO: 349 - DNA, 933 bp, Mus musculus
  MOR165-6
atggctttgataaatggctctgtggtaacagaattcattctcttgggattaacagaccagcctgaccttcaagtacccctgttcctggtctttctattaatgtacatgataactgcattggggaatttgactttaattattctcatcgtgctgaattctcaccttcatacccctatgtatttttttctttttaacttgtcctttgtggacttttgttactcttctgtaattataccaaaaatgctgatgaactttattctaaagaaaaattttatctcctatgtgggttgtatgactcagttctacttatttggtttctgtgtcattttggagtgttatattctcacatcaatggcctatgatcgttatgtggctatctgcaatccactcttgtataacattgtcatgtctccgaagttgtgttcctatctcatgcttggttcatatttgatggggttttctggtgctatgatccacactggatgtgtcctgagactgtcgttctgtgatggcaacatcatcaaccactatttctgtgatctcctccctttgctgcaactctcctgcaccagcacctatgtcaatgagatagaggtgttaattgtagcagggaaggatatcattgtgcccactgtgatcatctttatctcatatggcttcatcctttccagcatatttcaaatgaaatccactaagggcatgtcaaaggccttcagcacctgtagttcccacataattgctgtctctctgttctttggatctggtgcatttatgtatcttaaacccaactcaactggaacaatgaacaatggaaagataccttcaataatttataccatcttaattcctatgatgaatccattaatttatagcttgagaaacaaagatgttaaagttgccttgagaaaaactttgagaaagaaaatcttgtaa

SEQ ID NO: 350 - DNA, 951 bp, Mus musculus
  MOR165-7
atggctctggcaaatggctcttttgtaactgaattcattctcttgggcttaacagaccagcctgaccttcaaatgcccctgttcctaatttttctaataatttatttgataacagcatttggaaatttgactttaataattttaattgtgttgaattctcaccttcacacacccatgtactttttcctctttaacttatccttcatagatctttgctattcttctttgatcacacccaaaatgctgatgaactttgtactagagaagaacattatttcttacatggggtgcatgactcagttctacttctttggcttttttgcgatttctgaatgttatgtgctgacagcaatggcctatgatcgctatgtggccatttgtaatccactcttgtatagtgttgccatgtctccaaagatgtgttcctatcttattcttggttcatatttcatgggattttcaggtgccatgatccacacaggttgtgtaatgagactgaccttctgtgatggaaacaccatcaaccattacttttgtgatctcctccctttgctgcaactctcctgcaccagcacctatgtcaatgagatagagttgtttattgtaacaggaaaagacatcattgtgcccactgtgatcatctttgcttcttatggctttatcctctccaatatcctcaaaataaggtccacttcaggcaggtccaaagccttcagcacttgcagttcccacataattgctgtttctatgttctttggttcaagtgcatttatgtatctcaaaccttcttcagctgtatctatgaatgaggcaaagttctcttccatattttacagcattgtggtacccatgatgaaccctctaatctacagcttgaggaataaagatgtcaaagttggcttgaaaaaaaccctgagcagaatgtttagtcataacctaatctcattatag

SEQ ID NO: 351 - DNA, 933 bp, Mus musculus
  MOR167-4
atgggttcggaaaatggctcttcagtgactgagttcattctggtgggattaaccaaggaccctgatctccaatgccctcttttcgtcctctttctagtgatgtatgttctcactgtattgggaaatctgagtttgattaccttaattgtactgaattctcatcttcctaccccaatgtactttttcctctttaacttgtcactagttgacttctggtactcttctgtgttcacaccaaaaatgttaatgagctttatatcagagaagaacattatttcctatagaggatgcatggcccaacttttctttttcagttttttctgcatttctgaatgttatgtgttgactgtaatggcctatgatcgctatgtggccatatgtaatccactcttgtacaatattgtcatgtctcctaaattatgtttgaacctcatacttgggtcatatataatggcattttctggtgccatggctcacacgggatgcatgctgagactgaccttctgtgatgctaacaccatcaaccactacttctgtgacatccaccctttgcttcagctctcctgcaccagcatctatgtcaacgagctggaggtttttgttgtaataggcatcaacattattgtgcccaccatcaccatctttatctcttatggtttcatcctctcaagtatctttcatatcagctcgaaggagggcaggtccaaagccttcagcacctgcagttcccacataattgcagtttctctgttctttggatcaggtgcatttatgtatctcaaaccatcttctgctgagtcaatgaatgaaagtaaagtctcgtctgtcttttataccaatacagttcctctactgaatcccttaatctacagcttgaggaacaaagatgttaaaattgccttgataaagaccctgagtaagagaaagtgctga

SEQ ID NO: 352 - DNA, 933 bp, Mus musculus
  MOR168-1
atggactcagtaaatatttctttggtgactgaattcattctggtgggattaactgacaagccttatctacaaatacccttgttctttatatttctggcaatgtacctagtcactgcattggggaatttatctttgataatattaactgtgttgaattctcaccttcacacccctatgtactttttcctctttaacttgtcctttgtagacttctgctattcttctgtgttcactccacaaatgttgatgaactttataacaaggaagaatacaatttcttacatggaatgtatgagccaactttatttcttttgtttttttgttatttctgagtgttatgtgttgacttcaatggcctatgatcgctatgtggccatttgtaaaccactgctgtataatcttgtcatgtcctctaaattatgtttgaacctaatgcttgtttcctactttattgcattttctgagtctgtggctcacactgtttgcataatgagactgaacttctgtgatgccaacaaaatcaaccactacttctgtgatattccacctttgctccaactttcctgtacaaccacatatatcaacaagcttgtagtttttgttgcttctagcatcaatatcattgttcccatttcaactatatttatttcctatggttttattctctccagcatctttcacatccattcttctgaaggcaggtccaaagctttcagcacctgtagctcacacatcattgctgcttttctgttctttggttcaggtgcatttatgtatttccaaccatcctcagctgagtctatggatgaaggaaaaatctcttctgtcttttatactaatgtgattcccatgatgaatcctctactctacagcttgaggaacaaagacataaaagtggctctgaggaaaaccctgagcaagaggaacatttaa

SEQ ID NO: 353 - DNA, 927 bp, Mus musculus
  MOR171-9
atgggcactgggaatcattctgcagcagttgtgtttgtcttggtgggattaacacagcagcctgaactcctgctgcccctcttcattctgttcctgggcatctatgtggtaacagcagtgggaaacctgggcatgatcctgctgatcacagtcagtccactgctgcatactcccatgtactatttcctcagcagcttatcctgtgttgatctctgctattccactgtcattacacccaaaatgctggtgaactttcttgggaagaaaaatgtgattgtctactcagagtgcatggcccagctctttttctttgtgatctttgtggtggctgagggctacctgctgactgccatggcgtatgatcgctatgtggccatctgtagaccattgctgtataatgtgatcatgtcctccagactttgctcactgctagtgttggttgctttcatcttaggctttgtttctgccttagcacacacaagtgctatgatgaatctgagcttctgtaaatcccatatcataagccattatttctgtgatgttcttcccctgctcaatctctcctgttctaacacacatctcaatgagcttctcctatttattattggagggttcaacaccttggtgcctactctagctgttgctatctcctatgtcttcatcttctgcagcatccttcacatcaagtcatcaaagggcaggtccaaatcctttggaacctgcagctctcatcttatggctgtggggatattctttgggtctatcaccttcatgtatttcaagccttcttccagtaactctctggagcaagagaaggtgtcttctgtgttctacaccacagtgatccccatgctcaatccattaatatatagtttgaggaacaaggatgtgaagaaagcattggggagattctttgtagggagataa

SEQ ID NO: 354 - DNA, 942 bp, Mus musculus
  MOR165-8
atggctctagtaaatggctcaactgtgactgaattcattcttttgggattaacagaccagcctggactccaaatgcctcttttcttattgtttctattaatgtacatgatcacagtattcggtaatttgactttgatatttttaattctgttaaattctcacctacatactcccatgtatttttttctcttgaatttatcttttgtagatctctgttattcttctgtgattacaccaaaaatgctgatgaattttatactaaagaagaatcttatctcttatatgggatgtatgtcccaactctacttcttttgttttttcataatttctgaatgttatgtactggtgtcaatggcctatgatcgctatgttgcaatctgtaatccactgttgtataacactgccatgtccccaagggtgtgttcttatctcatgcttggttcatatttgatgggattttttgatgctatgatccatactggttgcatgctcagactgagcttctgtgatggcaatatcatcaaccactatttctgcgatgtcctccctttgctgcagctctcttgtaccagcacctatgtcaatgagacagaaattttcattgtagggggaaaagacatcattcttcccagtgccattatctttttctcttatggcttcattctctccaacattttccaaataagatccactttgggccggtccaaggccttcagcacttgcagttcccatataattgctgtctctctgttctttggatcatgtggattcatgtacctgaaaccttcctctgctgtatctattgatcaaggaaaaatctcttccattttttataccattgtggttcctatgatgaaccccctaatttatagcttgagaaacaaagatgttaaagttgccctaagaaagactttgagtaggaggaagtttttaaaagtatag

SEQ ID NO: 355 - DNA, 936 bp, Mus musculus
  MOR161-3
atggacactaaaaatatttccttcattactgagtttatcctggttggcttaacagaatatacagagactcatttcccctttttcttcctcttcctaggcatctatgctatcacagtggcaggaaacctgggcctgctcactctgattggaatgaattcccctcttcacactcctatgtactacttcctctttaatttatctttcattgatctctgttactctactgttattactccaaaactgttagtaaactttgtttctgagaggaacacaatttcctatgaaggatgcatgactcagctctatttctactgcttctttgtcagtgcagaatgctatgtgttgacagtgatggcatatgatcgctatgtggccatctgtaagcccctgttgtacactgttaccatgtcccctcaggtatgctctctgttgactctcattgtatatgtgggagcatttattggtgcatgggcccacacaggttgcatgatgaggctgaccttctgtaaggacaacactgtcaatcattacatgtgtgacatccttcctctgctagagctttcctgcagtagcacttacattaatgagcttgtagtattcattgttgtaggttttgatgtaggtgtgcccagcatcaccatcgttgtttcttacacattcattctttctagcatccttcacatccgatccactgaaggcagatctaaggctttcagcacctgtagctcacatattattgtggtttctgttttctttgggtcaggggcatttatgtacctccatccttcctctgttttgtccatggatcaagggaaagtgtccactgtattctacaccattgtggtacccatgctcaatcctttgatctacagcttcaggaacaaggaggtcaagattgccctgagaaaaaccttgaggatgaaaatatcctcctga

SEQ ID NO: 356 - DNA, 948 bp, Mus musculus
  MOR260-1
atgatgcaggcaaatcagacacaggtgacagaatttattcttctgggactctctgatgacccccacacccagaagctgctcttcatcttatttctgggcatctatatggtcactgtacttggaaacctacttctcatgttccttgttcgggctgactctcggcttcacacacccatgtatttttttctgtgtaacttgtcactggctgacctctgcttttctaccaacattgttccacaggctctcatccatctcctttcaaggaaaaagactatttcatttagacgctgtgcagcccagcttctgctctttctcatctttgggtgtacacaatgtgcccttttggctgtgatgtcctatgatcggtatgtggctatctgtaaccctttacattactctagcatcatgacatggagggtgtgtatccaactggctacagtgtcatggactagtggcattttagtgtctgtggtggacaccactttcacactaagacttccctatcgaggcagcaacagtattgctcacttcttttgtgaggcccctgcacttttggccctggcttctacagacactcaaacttcagagatggctattttcctcatgggggttgtgattctccttatacctgtctccctaattctggtgtcctatggccatatcatagtaactgttgtcaagatgaaatcagctgctgggaggttcaaggcattttctacctgtggctcccacctcatggttgtcatcctcttttatggatcagcgattatcacctacatgaccccaaagtcttccaaagaacaggagaaactggtgtctgttttctatgcaatggtgacacctatgcttaatcccctcatctacagccttaggaacaaagatgtaaagggagctttgtggaaagtagccatgaagaacttctcaagcaggcttagaatcacccactga

SEQ ID NO: 357 - DNA, 930 bp, Mus musculus
  MOR183-1
atgggaatagagaatacaacactactgacagaatttgttctcacaggactcagtcatctgccacaatggaaaatccccctgttcctgctgttcttggtcatctatctcatcaccattgtgggcaaccttggtctgatcactctcatctggaatgaccctcaccttcacattcctatgtacttttttcttgggagtttagcatttgtggatacttggttatcatccacagtgacaccaaagatgctcttagacattttttccaagagtaaactgatctctttctctgaatgcatgatacagtttttttcatttggaatcagtgcaaccacggaatgttttcttttggcatcaatggcctatgatcgctatgtagccatatgcaaacctttactctacccagtgatcatgacaaatagactctgtgtacgtcttttaacattgtcctttgtaggtggattcattcatgttttgattcatgaaagctttttattcagactaactttttgtaattctaacataatacatcacttttattgtgatgttatgccactgttaaagatttcctgtaatgacccttctctcaattacctaatgctttttattttctctggctcaattcaggtattcagtattttgactattcttatctcttatacacttgttttgttttcaatcctaaagcagaaatctctcaaaagcataaagaaagccttttccacctgtggagcccatctcctctctgtctctttgtactatggctctcttctcttcatgtatgtgcgtcctgcatctccacaagtagacgatcaagatatgatggactctatattttacactgttataattcctgtactgaatccaattatctacagtttgaggaataagcaagtaaaaaattcactggaaaaattcttaaagagaaacacttag

SEQ ID NO: 358 - DNA, 927 bp, Mus musculus
  MOR225-4
atgggatatggaaaccttacagaatttatcttactgggacttttccataatgaggatgtcaaggcaatatgtgctgtgttgttcttgctttgctatcttgcaattctctgtggaaacctggttgttcttcttactatcaagggcagtcaacttagtgagcagccaatgtatttttttctcagctatctgtccttcatggatgtttgcttcacttccacagtagccccaaaatttattataggcctattggtacaatgtaacacaatctcctacaatggctgcatagcccagatgttttatgcacacttctttggtgccactgagatattcatcttggtggtaatggcctatgatcggtatgtagctatttgcagacccctttactacatgatcaccatgagcagacaggtatgttacatccttgtgataggctcagtttttggtgcttttatacactcacttgtgcatgtactggttattatcagacttcccttttgtggcagcaatgaaatagaccactacttctgtgacatattccccctgctgaagctggcctgtactgacacaagactcctggttattgtaatcattactaccacaggggtgatgtccattctgacctttgttgcattggtcatttcttacatcatcattttgtccatcttgaggaccaggtcatcagagagccgccgcaaagctctttctacctgtggctcacacatcaccgttgtattcatgttcttcttgccactcatctttacctatgtcccaatgggtgattctgttggggacgacaaggtgtttgctctgttttacaccatgattgccccattgttcaaccctctcatctacacactgaggaatacagacatgaagaatgccatgaggaaggtgtggtgccaagacaaactgtttgaaggaaagtga

SEQ ID NO: 359 - DNA, 957 bp, Mus musculus
  MOR110-2
atgaagaaccagtctctggaggtagtgttcgttttgcttggactgacaggagaccctcagctacaaattctgattttcctgtttctgtttttcaattacatcttgagcctgatgggaaatttagtgatcatccttctcaccctgctggatcctcacctcaaaactccaatgtacttcttcctccggaatttctccttcttagaaattgcattcactacagtctgcattcccaggttcctcacaagcattcttttaggagagaaaatgattttgtataatgcttgtgtggctcagttattcttcttttttctactaggggccacagagttctacctcctggctgccatgtcctatgatcgctatgtagccatctgcagaccactgcactaccccatcatcatgaatagcaaagtatgtcacctacttgtcctcagttcctgggtaactgggttctttgtcatcttaccccctttgctcttgggactcaaactggatttctgtgcttccaaaactgttgatcacttcctttgtgacacttctgtcctgcagctgtcttgcacagacacacggttaatagaactgatggcttttgccttagctataatgacacttatcattaccttgatcttagtgcttttctcctacacactcatcatcaaaaccatcctaaagttcccttcagctcaacaaaggaaaaaagccttttccacctgctcctcacacatggttgttgtctccattacttatgggagttgtatcttcatgtatgttaaaacctcagccaaggagagagtgaccttaaataaaggaatagctgtgctcaacacctctgtggcccctttgctaaaccctttcatttataccctgaggaaccagcaggtaaaggaagctttcaaaaatgtgattcatagattttgttcttttaaaaaccatgagacaagatttagacatcaataa

SEQ ID NO: 360 - DNA, 933 bp, Mus musculus
  MOR109-1
atgaggaaccacacaacggtgacagtattcattcttcttggattaacagatgatctacaactgcaagtggttgttttcgtccttctctttctcacatacatgctgagtgttactgggaacctgaccatcatcacactcactctgctggattctcatctcaagacacccatgtatttcttcctacgaaacttctcatttttagaaatttcattcacaactgtctgtatccccaaattccttgttagtatggccacaggggataaaaccatttcatataatgagtgtgcagctcaactatttttcactattctcttgggagcaactgaattttttcttctggctgccatgtcctacgatcgctatgtggccatctgcaaacccctgcactacatgaccatcatgagcagcaaaatttgcaacttgttggtctttgtttcctggttgtctggttttctgatcattttccctccactcctcatgggtctccagctagatttctgtgcagccaacactgtagaccatttcttctgtgatgtttctcctatacttcagctctcctgcacagacacacacataatagaattaatgatgcttctctctgccattttgacactcttggttacactggtattagtaagcctttcctacacaaacatcatcaggactattctgagaatcccatcttctcaacaaagaagaaaagctttttctacatgttcttcccacatggttgtggtgtccatttcttatggcagctgcatctttatgtatgtaaagccatctgcaaaagaaagagttgctttaaataaagggatagctctgctcagcacttcagttgcacccatgttgaatcccttcatttatacacttagaaacaaacaagtaaaagatgcttttaagaatatgacaaaaagatggagcttttatcaatga

SEQ ID NO: 361 - DNA, 933 bp, Mus musculus
  MOR204-4
atggaggctgaaaaccataccacggtggcagagctaatcatcttgggactaacagaggaccccaagctgtgtatagtcttttttgtgatatttctaggagtatacattgtcactttagtaggcaatatcagcatcatcacgttgataagaatttcctcccagctgcacacacccatgtacctattcctcagccacctggcttttgtagacattttatattcaacctcggtctcagttataatgcatatggagctccttggacatgggctagccttacctgtagctgcctgtgcagctcagctctgtatcacagtgtcatttgggtcagctgagtgcttcctactggctgccatggcctatgatcgctatgtagcaatctgttcacctctcctgtattcgacactcatgtcccctagagtctgttttctattgctgggaatgtcctatgttggtggctgcatgaatggttggacatttactggttgtttgttaagtttgtccttttgtggaccaaatcagatagatcactttttctgtgacttctcccctttgctgaaactttcctgctcagatgtctccattattggaatcatcccctctatctcttctggctccattattgtggtgacagtttttgtcatagctgtctcctacatttacattcttattaccatcctgaatatgcgctccaccgagggtcgccacaaggccttctccacctgcacctcccacctcactgcagtcactctctactatgggaccattaccttcatttatgtgatgcccaagtcgaactattctactgaacagaacaaggtgctttctgtattctacacagtggtgattcctatgctgaatcctctcatctatagtctgaggaacagagatgtaaaggaggctctgaggaaagctactgtcagagtatattcatag

SEQ ID NO: 362 - DNA, 933 bp, Mus musculus
  MOR204-5
atggaggctgaaaaccataccactgtggcagagctaatcatcttgggactaacagaggatcctaagctgtgtatagtcttttttgtgatatttctaggagtatatattatcactttagtaggcaatatcagtatcatcacattgataagaatttcctcccaactgcacacacccatgtatctattcctcagccacctggcttttgtagatattgtattttcaacctcagtctcagttataatgcttatggagctccttggacatgggctggtcctgtctgtggctacctgtgcagctcaactctgtatgacagtgtcatttgggtcagccgagtgcttcttactggctgctatggcctatgatcgctatgtagcaatctgttcacctctcctctattcaacactcatgtcctctagagtctgttttctattgttgggaatatcctatgttggtggctttgtgaatggttggacatttactggttgtgtgttaagtctgtccttctgtggaccaactcagataaatcactttttctgtgacttctcccctttgctgaaagtgtcctgctcagatgtctccattattggaatcatcccgtctatctcttctggctccattattgtggtgacagtttttgtcatagctgtctcctacatctacatacttatcaccatcctgaagatgcgctccactgagggccgacacaaggccttctccacctgcacctcccacctcactgcagtcactctcttctatgggaccattaccgtcatttacgtgatgcccaaatcgagctactctactgaacagaacaaggtgatctctttattctacacagtggtgattcctatgttgaatcctctcatctatagtctgagaaacagagatgtaaaagatgctctgaggaaagcaattgtcagagtatattcatag

SEQ ID NO: 363 - DNA, 933 bp, Mus musculus
  MOR204-6
atggaacctggaaactacacagtggtaacagaggtgattcttttgggatttacagaggatgctataatccgtgccattttatttattgtgtttctaataatctactctgtcaccttaatgggcaatgcgagcataatcatgctaatcagaagaagccctcagcttcacacccccatgtaccttttgctcagccatttggcatttgtagacattgggtactcctcatcagtcacacccatcatgctgaagggctttctcagaaaagaaacatttatccttgtgtctggctgtgtggctcaactctgttctgtagtgacatttgggtcaactgagtgcttcctgctggctgccatggcctatgatcgctatgtagccatctgctcccctctgctctatgccacgcagatgtcctccacagtctgtattctcctagtgggagcttcctacctaggtggatgtgtgaatgcttggacatttactggatgtttattaaacctgtccttttgtagaccaaataaagttaatcactttttctgtgactattcaccacttttgaagatttcgtgttctcatgacttttcttctgaagtcattccagcaatctcttcagggtcgatcattgtggtcactgtgtttattattgcactgtcttatgtttacatccttgtctcaatcttgaagatgcgctccactgagggtcgccagaaggccttctccacctgcacctcccacctcactgcggtcactctattctatgggaccatcacattcatttatgtgatgcccaaatccagttactccacagaccagaacaaggtagtgtctgtattctacacagtggtgatcccaatgttgaaccccatcatctatagcctcagaaacaaggatgttaaagaggccatgaaaaaattgatggctaacactcaccattaa

SEQ ID NO: 364 - DNA, 921 bp, Mus musculus
  MOR237-2
atgatgaataaaaacaatgtgacagagtttattctgttgggagttacaagggacccagagctgaggaaaatattgtctgttttgtttcttattatgtatatggccacagtctttggaaatctactcattgtggttaccataaccagaagccctagtctgaggtcacccatgtacttcttccttttatctttgtcactcatggatgtcacttactcttctgtcattgctccaaaattgattatggactccctttctgagaggactattgtctcatttgaaagatgtatgacccagctatttgcagaacatttctttggtggtgtgggcatcatccttctcattgttatggcctatgatcgctatgtcgccatctgtaagcctctgcactacgtgaaaatgatgactcctagggtgtgctgcttgatggtaggaggagcttgggtagggggatctatgcatgcaaccattcagcttctctttatgtatcaaataccattctgtagctcaaatatcattgaccactttatgtgtgatttgtttccattgctgaagctggcctgcatggatacacatatcttgggtctcttagtcattctgaacagtggggtgatgtgtgtttccattttccttattctcattgcttcctacatggtcattctctgctcccttaagtcttatagttctgaagggagacgcaaagccctctctacatgtagctcacattttgcagtggttgtattgttttttgtgccatgtattttcttatatatgaggcctgtggtgacattcccaatagacaaagcaatggctgtgtcatttactattgttgaaccgatgttaaatcctttgatctacaccttgagaaatacagaggtaaaatatgctataaagaacatgtgcagaaaacaggggtcccactaa

SEQ ID NO: 365 - DNA, 948 bp, Mus musculus
  MOR174-5
atgcagcatcaagtgaatcagagtactggagtcgtatttgtcttcgtgggattctcagagtatccgaacttacaggtgcctttattcctgatctttttgatcatatacaccatcactgttttggaaaatctaggaatgattttggtcatcaggatcaatgctaagctccatactcctatgtactttttcctcagccatttatccattgttgatctttgttacaccactgtgattgccccaaaactgttagaccttctgataacagaggacagatccatgtccctcaaaggatgcataattcagttttactttggctgtgcttgtgtggttacccaaaacttcatgttagcagtaatggcctatgatcgctttgtggccatttgtaaccctctgctctacacagtggctatgtctcagaagctctgtgctctcctagtaactggaacttacctatggggtgggctctgtgccaccacactaacatattttctattggcattatcttactgtagatcttccatcattaaccacttttgctgtgagtactctgccataatttctgcagcctgttctgattcttctatcagccagatagcgtgcttgttaatttgcatgttcaatgagatttgtagcctccttatcatcattgtctcatatgttgtcatattcaccactgttatcaagatccccactaaaggagcactacaaaaagccttgtccacctgtgctccacacctgactgccatctctttctgccatgggattattctccttctatactgcgtgctcaagtcaaagagctcactgcttcttgttaagatagtcactgtgttttacagtatggttatccctatgcttaatcctcttatttacagcctaagaaataaggatgtaaaagagactgtgaggaaattaatccatatgaaaatcctttctcagtcattataa

SEQ ID NO: 366 - DNA, 939 bp, Mus musculus
  MOR172-3
atgggaatttggaatcatacaagtgtgaaagaattcatactgatcggcttaacagaaaaccctaattggcaggttcctctcttttttcttttttgcatagtttatttcatcattcttgtgggtaattgggggatgatcatcttgatttggttaaatgctcagcttcataccccaatgtacttcttccttagtaacctctctttctgtgacatctgctattctacaatcattgctcctaaaatgctcatcaatttcctatcagaacacaagtctacaaggctgtttgcctgtattcttcagagtttcttttttgcagtttatgtaaccacagaagtaatattcctgtctatgatggcctatgatcgctatgtggcaattgcaaatcccttaatgtatactgttatcatgacaaacaacatctgcactcaaatggtacttgcaagttacttgggtggcctcataaattccatgattcacacaattggtttactcaaactagacttctgtggtccaaacattgtgaatcatttcttctgtgatgttcctcctcttttgaagcttgcatgctctgatgcacacatcaatgagatgctgcttttggtcttctcaggtgtgtttgctatttccactttcatcattgtcatggtgtcctatatccacattatcattgccatcctgagaatccgctcagctgaggggaggcgtaaagccttctccacttgtgcctcacacctaacagctgtggcattattttatggatctttgacatttaactatatccagccaagttctcaatactccatggaacaggaaaagctctctgctgtgttttacaccttggtcatccccatgctgaaccctctgatttacagcctgaggaacaaggatgtaaaggaagcagccaagaagttaatttgtggggagagaaatgccccttga

SEQ ID NO: 367 - DNA, 939 bp, Mus musculus
  MOR172-4
atggcaatttggaatcatacaggtgtgagtgaattcattctggtaggcctgactgaaaatcctaattggcaggttcctctcttcttgcttttcagtgtagtgtatttcatcattcttgtaggtaattggggaatgattatcttgatctggttgaatgcccaacttcatacaccaatgtactttttccttagtaacctttctttctgtgatatctgctactctactatcattgctccaaagatgctgctcaatttcttgtcagaacacaagtctagtacattctttgcctgtattctgcagagtttcttttttgcagtttatgtaacgacagaagtaatcctcctgtctatgatggcctatgatcgctatgtggcaattgcaaatcccttaatgtatacggttatcatgacacacaacatctgcactcaaatggttcttgcaagttacttggggggcctcataaattccatgattcatacaataggtttactcaaactagacttctgtggtccaaatattgtgaatcacttcttctgtgatgttcctcctcttttgaagcttgcatgctctgatgcacacatcaatgagatgctgcttttggtcttctctggaatgattgctattttcactttcatcatcatcatggtgtcctatatccacattatcattgccatcctgagaatccgctcagctgaggggaggcgcaaagctttctccacttgtgcctcacatttgacagctgtgacattattttatgggtctttgacttttaattatatccagccaagctcgcagtactccatggaacaggaaaagctctctgctatgttttacaccttggtcatccctatgctgaaccctctgatttacagcctgaggaacaaggatgtgaaggaggcagcaaaaaggttgatttgtagggagagcagtacctcatga

SEQ ID NO: 368 - DNA, 939 bp, Mus musculus
  MOR206-3
atgaataccttgaattatacatttaagcctgatttcatcctcatgggactgacagattccaaggaggttcagctggtcctatctgtgctttttctcctgatatacctggtcactgttctggggaacataggcatgatactgatcatccgtctagatgtccagcttcatactccaatgtatttttttctcacccacttgtcattccttgacctcagttactctactgtcatcacacctaaaactttagaaaacttgctgacttccactaagaatatttctttcatgggctgcttcactcaaatgtacttttttgtccttttggcagctactgagtgtttccttttgtcttcaatggcctatgatcggtatgtagctatctgcaaacctctacattattcagtcattatgtccaaaagattctgtagtgccctccttactgggtcatatgtgtttggagctgtggattccactgtcaatatgttatgcatgggtacactggatttctgcaactccaatgtcatccatgactttttttgtgacacatccccacttatagccctctcatgcagcaacacacatgatattgaattcattatattcatttttgctggttccactctactgttatctcttatcacaatatctgcatcttatttatctattctctctaccattttgaagatcagttccacttcaggaaagcaaaaggccttctcaacttgtgcctctcatatcctggcagttaccatattttatggtactatgatcttcacccatttaaaatcaaataagtctttctctttgggaaaggatcaagtggcttctgtgttttacaccattgtgattcccatgcttaacccactcatttatagtctcagaaacaaagaagtaaaatgtgctattgatagaattataaagaaaagagaaaaaggtctctag

SEQ ID NO: 369 - DNA, 933 bp, Mus musculus
  MOR207-1
atgacagagaataatttcacaaaagtgacagtcttcatgttcagtggattttcagatcacccagaattacaagtcagtctgttcttaatattccttttcatctatttattcactgtgtggggcaacattgggttaatcttgttaattagaattgactctcagcttcacacacctatgtattttttcctcagcaatttagcattcattgacatattttattcctccactgtaacacccaaggcactagttgatttccagtccacacagaaatcaatatcctttgtaggctgctttgttcagatgtatttctttgttggtttggtgtgcagtgagtgtttccttctgggatccatggcttatgatcgctatgtagcaatctgcaatcccttactatattctgtgattatgtcccagaaggtgtgcaactggctggcagtaataccatacatgataggcttcacaaattctctgatatccatctgtgtgataagcagtttgcctctctgtgatccctacatcaatcatttcttttgtgacaccacagctcttttagccctgtcctgtgtagatgccttcagcacggaattggtgatctttgttctagctgggttcacactcctcagttctcttctcattatcactttcacttatgtgaccatcatctcagccatccttaggatacagtcagcagctggcaggtggaaggctttttctacatgcgcctctcacctcacaggggtcactgtcttctatggctctttgattttcacctatttgcaacctgataacacatcatccctcacccaagcacaggtagcctctgtgttctacaccattgttattcccatgctgaacccactgatctacagtctgagaaacaaagatgtgaaaaatgctcttctgagagtcatccacagaaaacaccttctgtaa

SEQ ID NO: 370 - DNA, 939 bp, Mus musculus
  MOR172-5
atggacccagggaatcatacagttgtgaaggaattcatactccttggcttaacagaaaatcccgattggcagattcctctctttttgcttttcagcataatttatttaatcatttttgtgggtaactggctaatgatcttcttgatctggttgaatgcccaccttcataccccaatgtacttctttcttagtaacctctctttctgtgatatctgctactctactgtcattgctcctaagatgctcatcaatatcgtatcagaacacaaatctagtagactcctttcttgtgttttgcagagtttcttttttatggtgtatgcaaccacagaagtcatcctcctgtctatgatggcttatgatcgctatgtggcaattgcaaaccccttaatgtatacagttattatgacattcagcatctgtattagcatggttcttgcatgttacttgtgtggcatcattaattccctgactcacacaataagtctactgagactggacttctgtggtcccaacattgtgaatcatttcttctgtgatgttcctcctcttttgaagctttcatgttctgatgcacacatcaatgagatgctgcttttagtcttctctggagtgattgctattttcactttcatcattgtcatggtgtcctatatccacattatcattgccattctgaaaatccgctcaactgaagggaggcgtaaagccttctccacttgtgcctcacacctgacagctgtgacattattttacggttctggaacatttagctatatccagcccagttctcagtactccatggaacaggaaaaagtctctgctgtgttttacaccttggtcatccctatgttgaatcctctgatttacagcctgaggaacaaggatgtgaaggaagcagcaaagaagttgatttgtgggtggagtaacacctcttga

SEQ ID NO: 371 - DNA, 918 bp, Mus musculus
  MOR248-9
atggtgtcagaatttatactctggggactttccagctcacagaggattgaagtcttactcttcatggtgttttcaatgctttatcttctcattgtttctggaaatattgtcattctggttttaatcaccactgacccccatctgcattctcccatgtacttcttgttggccaacctgtcctttattgatatgtggctttcctcagtcactactcctaagatgattacagactttctcagagaaaacaagaccatttcctttgcaggatgcatgtcccaggtcttctttgcccattgtattgctgcaggagagatggtgctgttggtgataatggcttatgatcgctatgtggccatctgcaaaccactccactacttcaccatcatgaatatgaagagatgcactgggttggtgttcacttcctggacaactggatttgtacatgctcttagtcatttggtagtgattgtggaattgcctttttgtggacctaaggaaatagatagctttttctgtgacatgccattggtaatcaagctagcttgcatagattcccgtgacttggatgttctaatgaatgctgattgtggacttgtggctgtaacttgctttattctgttgcttatttcctacacatatattcttatcaccgtatgtcagagctctaaagctggtgcatctaaggcaatgaacacatgcactgcccacattacagtggtgctgatcttttttgtgccctgcatcttcatctatgtgtggcctctcagtatcatttggttggataaatttcttgctgtattttactctgtttttacacctctcctaaatccagccatttatactctgagaaataaagagatgaaaaatgccatgaaaaaatttataaacagctaccttagtcacaaaggaaatttataa

SEQ ID NO: 372 - DNA, 930 bp, Mus musculus
  MOR115-1
atgaaaaataaaacttcattgactgaattcatccttctaggtctcacggatgtccctgaacttcaggtggcagttttcacttttctttttcttgcctatgtattcagcatgattggaaacctgaccatcctcatcctcaccctgctggattcgcaccttcacactcccatgtatttcttcctccggaacttctccttcctagaaatttctttcacgaacatcttcattcccagggtcctggtcagcattacaacgggaaacaagagtattagctttgctggctgctttgctcagtatttctttgccatctttcttggagcaacagagttttatctcctggctgctatgtcctatgatcgctatgtggccatatgcaaacccctgcactacatggcaatcatgagcaacagagtctgtacccatctggttctctgctcttggctaggtgggttgatggccattatacctcccatcactttgatgagtcagcagaacttctgtgcatccaacaggctaaatcattatttctgtgactttgagcctcttctagaactctcctgttctgacacaagcctcattgaaaaagttgtctttcttgtggcatctgtgaccctggtggtgactctaatgctggtaactctctcctatacattcatcatcaagacaattctcaagctcccttcagcccagcaaaggacaaaggctttttccacgtgttcttcccacatgattgtcatctccctctcttatgggagctgcttcttcatgtatgttaagccttcagcaaaagtagggggcacattcgataaaggagtagcccttctcattacttcagttgctcctttattgaatcccttcatttataccttaaggaaccaacaggtgaagcaagcattcaaagatacagtcaaaaagcttgtgaatctttaa

SEQ ID NO: 373 - DNA, 933 bp, Mus musculus
  MOR267-4
atgaagagagccaactgcacagaggtaagagagtttgttttccaaggcttctccaatttccaagagcatcagctcacactcttcattatcttctttgccctatatatcctgacgctgactggcaatgtcatcattgtgaccattatccgcattgaccaccaccttcacacccccatgtatttcttcctaagtgttctctcaacttcagagactttctattctctggtcatcatcccacgcatgcttggcagccttgtgggtctgagccaaaccatctccttggagtgctgtgggactcagctattttttttccttggatttggaatcaccaactgtttcctgctagcagtcatgggttatgatcgctatgtggccatctgcaacccgcttcgctatagcgtcatcatgaattggagggtgtgtgtcattctggcatcttcagtctgtgccacagggttcttgctctcactagtccaggctctggccatattcaggctgccattttgcaacacactgattaaacatttcttctgcgatgtccgtcctattttggatctggcctgtactgtgccagtcatcaatcaagtcttgacattagtactcactctcatggtcctcacagcccctgccattttcctatttgtctcctatgctcttattatttccaccattctcaagattgcctcatctgatggctggaaaaaaacatttgccacctgcagctcccacctgactgtagtagtgattcactatggctgtgcctccattgtatacttcaagcccaaatcagagaacagtaaggaccaagaccagctgctctcagtgacttacactgtaataacacctctactaaaccctgttgtgtatagcctaagaaacaaagaagtccaggatgctctgcggaaagtgttgtgtaggaaatccctttcttag

SEQ ID NO: 374 - DNA, 933 bp, Mus musculus
  MOR267-5
atgaagaaaaccaactgcacacatgtaagagagtttgttttccaaggcttctctaatttccaagagcatcagttcacactcttcgttgtcttctttgtcctatatatcctgactctggctggcaatgtcatcattgtgaccattatccgcattgaccaccaccttcacacccccatgtatttcttcctaagtgttctctcaacttcagagactttctattctctggtcattatcccacgcatgcttggcagccttgtgggtctgagccaaaccatctccctggagtgctgtgggactcagctattttttttccttggatttgcaatcaccaactgtctcctgctagcagtcatgggttatgatcgctatgtggccatctgcaacccgcttcgctatagcgtcatcatgaattggagggtgtgtgtcattctggcatcttcagtgggagccacagggttcttgctctcactaattcaggctgtggccatattcaggctgccattttgcaacacactgattgaacatttcttctgcgatgtccgtcctattttagatctggcctgtacagtgccagtcatcaatgacatcttgacattagctcttagccttatggtcatcacagcccctgccactttcctctttgtctcctatgttcttattatttccaccattctcaagattgcctcagctgaaggccggagaaaaacttttgccacctgtgcttcccacctcactgtggttgtgatccactatggctgtgcctctattgcctacttcaagcccaaatcagagaacactaaggaccaggatcagttgatctcagtgacttacactgtaataacacctctactaaaccctgttgtgtatagtctgagaaacaaagaagtccaggatgctctgcgaaaagtgttgggtaaaaaatccctttcatag

SEQ ID NO: 375 - DNA, 918 bp, Mus musculus
  MOR213-2
atggatcagaataataatactgttagtgagttcatcatgttgggattcacaacagatcctgtgatacagaaggtcctgtttgcagtgtttcttgttgtgtacacattgactttgatgggaaatagctccctcattatgttaatctgcaatgactctaggctccacacacccatgtatttcttcattggaaacctatcattcctggaccttggattgtcttctgtctacacaccaaagatcctagaaacctgcatctcagaagacaagagcatttccttcgccggttgtgtagctcagttcttcttctcagctgcactggactatactgaatgttaccttttggctgccatggcttatgaccgctatgtggctatttcaaagccactgctttattcacaagccatgtccttaaagctgtgtgtgtgttttgtggcagcctcatatgtgggaggttttattaactctgtgatcattaccaaagacacatttgccttgactttctgcaatgataatgtaattgatgactttttctgtgatatcccacccctggtaaagctcgcatgtggcaaaaagaagagctttcagtctgtgttattcttcctcctgacttccaatgtcatcatccccattgtgttcatcctggccacctatctcttcatcattgccactatcttgaggatccgctccactcagggccgcctcaaggccttctccacctgctcctcccacctcatctctgtgaccttgtactatggctccattctctacatctatgctcggccccggtccagctactctttagatagagacaaaattgtttcaaccttttacacagtggttttccccatgttgaatcccctgatctatagtctgaggaataaggatgtgaaagaggctctgaataaactcctcaagtaa

SEQ ID NO: 376 - DNA, 954 bp, Mus musculus
  MOR103-10
atgagaaatctgagcggaagccacgtggaggagtttgtcttggtggggtttcctacctctcgacccttccaggcactcctctttgttttcttttttgcaatttatctgttgacgttactggaaaatgtactcattgtttcgacaatctggctcaccccaagcctccatcgccccatgtactttttcctcggccatctctccttcctggaactatggtacatcaatgttactattcccagactcttgggagcctttcttacccaggatggtagagtctcttatggaggctgcatgacccagctctacttctttattgccttagcctgcactgagtgtgttctgttggcagttatggcctatgatcgctacctggctatctgtgaaccccttcgttaccctagtctcatgcctcccagactggccactcgcctagcagctgcctcttggggcagcgggttcttcagttccatgatgaagctgcttttcatttccaggttatcctactgtgggcccaatatcatcaaccactttttctgtgatatttctccactgctcaacctcacttgttcagacaaggaacaggccgagttagtagacttcctgctggcgctggtcatgattctgttgcctctagtggctgtggtttcctcatatgccgccatcattgtagccatcctgaggatccctacagcccagggacgccacaaagccttctccacctgcacctcccacctggcagtggtggtcatctactactcgtccactctcttcacctatgcacgaccccgagccatgtacaccttcaactacaacaagatcatctctgtgctctacactgtcattgtcccattcctcaatccagccatctactgcttgagaaacaaggaggtgaaggatgccttcagaaagaccatgctgggaagatgccaccatcctagggaaggtccagattga

SEQ ID NO: 377 - DNA, 939 bp, Mus musculus
  MOR32-4
atgtcaccaggcaacagctcatggattcatccttcttccttcctgctcttgggaatcccaggactggaagagttgcagttctggcttggtttgccatttggaacagtctatcttattgctgtcctagggaatgtcatcattctctttgtaatctatctagagcacagccttcaccaacctatgttctacttactggccatactggctgttactgacttgggtctgtctacagcaactgttcccagagcactcggtatattctggtttggcttccataagattgcctttagggactgtgtagctcaaatgtttttcatacatctgtttacaggcatcgaaacattcatgcttgtagctatggcctttgatcgctacattgccatctgtaaccctctccgatataacactatcctcaccaacagaacaatctgcattattgttggagttggactatttaaaaatttcattttggtttttccacttatatttctcattctaaggctttcattctgtggacacaatatcataccacacacatactgtgagcacatgggcattgctcgactggcatgtgtcagcatcaaggttaatgtattatttggattaatactcatatctatgatacttctggatgttgttttgattgctctgtcctatgcgaaaattcttcatgctgtatttaaactcccatcctgggaagccagactcaaagctcttaatacctgtggttcccatgtgtgtgtgatcttggctttcttcactccagcctttttctccttcttgactcatcgatttggacacaatattccacgatatatccacatcctccttgctaacttatatgtgatcattccccctgctcttaaccctcttatttatggggtgagaaccaaacagattcgagatcgtgtggtgatatttttttgcaaggaagtttga

SEQ ID NO: 378 - DNA, 963 bp, Mus musculus
  MOR119-1
atggcaaaagaagtggaggtaaggatgaaggcgtggaatgagacaacagtcctggagtttgtcctggagggcttccttgtggctcagcacctgggcaaggtcctcttcctcgtgcacctgctggtgtatctggcctcagtcacaggaaatactctcatcatcgccatcacgtggtccgatcctcgcctgcagaccccgatgtacttcttcctcaggagtttctccttttgcgagtgctgtttcatctccaccgttatcccgaagctcctggcgatctttctttttggagacagaacaattcatttcactccctgtatcatccaagcgttttcttttttgtttcttgggtccacaattttcttccacatggctgtgatgtccttggatcgctacctagccatttgcaagcctctgcgctacccagccatcatgaaccccagggtctgtttccttctggttttcttcagctatgtgctttccttcatcctagtaaccggtgtgattctgaggctttccaggctgtctttctgtggctccaatgtcattccccacttcttctgtgaccttggctccttaattcatctctcctgttcagacaccaaatctcttgaaagcatggccttcggtgtcgctgtggttgtccttttcacatctgtccttgcggctatatttgcatatagcaacatactaatctcaatcatgcgtcttccattggccaaggatcgacagaaagctttctccacctgctcatcccacctcatcgtcctctctctgatgtatggcagctgtgtgtttatatatgtgaaaccgaagcaagtgagcaggcttgaatccaacagagaggccgctctcgtaaacacggtagtgacgccgcttctgaatcctgtcatctatactctgcgcaacaagcaggtccaccaagctctgagggacgcactatccagggtgaacttacagaaatag

SEQ ID NO: 379 - DNA, 942 bp, Mus musculus
  MOR32-5
atgcttcattccaacaagacccagttccacccttcctccttcctcctgatagggatcccagggctggaagagttgcacctgtggattggctttcccttctttgcagtgtatttaatagctgtcttggggaacatcatcatcttatttgtgatccaaactgaacgcagcctccaccaacccatgttctacttcttggccatgttggcatgcactgatttgggcctatccacagctactatccccaagatgctgggtattttctggttcaatctcagggagattgcatttggagcctgcatcactcagatgtatataatccatacatgcactggcctggagtctgtggtactgacaattatggccatagatcgatatattgctatatgttacccactgaggtacagtatgatactcaccaacaaagtgatagctattctgggtataatcatcatagtcaggactttgatatttgtgactccatttatatttctgatcttgaggttgcctttctgtggtgtccggattattccacatacctactgtgaacacatgggtttggcaaagctagcatgtgccaatatcaaggtcaatgttatttatggattggtcgctttctcagtgggatacattgatctgtctgtgattggattttcctacatccggattctccaagcagtcttccgccttccatcctgggatgctcggcttaaggcactaagtacatgtggctcccatgtcagtgtcatgttggcattttaccttccagctctcttctcattcatgacacaccgctttggccacaatatccctcactacatccacatacttctagccaacctatatgtggttgttcctcctgccctgaaccctgttatctatggagtcaggacaaaacagataagggaaagagtactaagaatgcttaaccctaagatgcactga

SEQ ID NO: 380 - DNA, 960 bp, Mus musculus
  MOR14-6
atgctacaaatgcaagacaacacagaattcctaagcaacttcacatcgaaattaccaaccttcttgttgactggcattcctggcctagagtctgctcatggctggatctccatccctttctgttgtctttatgccaccgccctctctggcaacagcatgatcctcttcatcattgtgacccagcatagcctgcatgaacctatgtactatttcctctccgtgctctctgccactgacctgggtttgactttttctacaatgtcaaccaccttgagaatcctgtggtttcaggcaaatgaaatcagtctagatttttgcattgttcagatgttttttctccatgggttcacatgtacagaatctggagtgttagtggctatggcttttgatcgttatgtagcgatctacaaacctcttagatataccatgattcttatgaattctagaattattcagataggtttcctagtgataatgcacactctactattaacagttccactacttctgctccttaaacctgtctctttctgtaaaaggaataccctctcccactcctactgttatcatccagatgtgattaagttagcatgttcagacactcgggcaaatagcatctgtggactggttgatctcattctgaccacaggggtagatattccctgcattgtcttatcttatatactcatcattcgctctgtcctcaatattgctttctctgaagaaaggcacaaggcctttagcacctgtgtgtcccacattgcagcagttgcagttttctacatccctacgtttagtctgtctctggtgcatcgctatggtcggtcagtgcccaaggtagtccatacaatgatggccaatgtttaccttcttttgccccctgtgctcaaccccatcatctacagtgtgaaaacaaagcaaatcagaaaggctattcttagtttgctctttgcaaaatga

SEQ ID NO: 381 - DNA, 951 bp, Mus musculus
  MOR26-3
atggtaaatgatacaacacatcactacatttcatttttctacctggttggtattcctggcttcgaaaatttttactacttgatcagcatccctgtttgcctcctgtttgtcctgaccttactggggaacagcgtagtcattgctactatcaagctggagccaagcctccaccagcctatgtatttctttctttgcatgctggcaatgaatgacattcttcttacctgttccacatccctgaaaatgcttggtattttctggtttaatgaacactggattgagtttgatgtctgtctaacacaaatgtattttatccacacactttgcatttttgagtcagccatcctggtggctatggcttttgatcgctttgtggccatttgcatcccactgcattacgcaaccatcctcacaacagccatggttattaagctgggtgtagttggcttgagccgagctctgctgatggttttgccatgccctcttctcattaagaggctgccctactacacaggctatataatccctcatacctactgtgagcacatggctgtggtgaagttagccagtgccaacactttcattaacagagcatacggaatctcagcagccctttcagtaataacattggacgtatggctcatagccgcatcttacataaaaatccttcaagcagtgttccggctttcttcccagaatgcccgctccaaagccctgggcacctgtgctgcgcatgtctgcactattcttgccttctatacacctgcactgtttagcttcctaactcatcgcattggcaagaatgtgcctccaagtgtccacatcatcttggcaagcatgtaccttctagtgccccccacagtcaatccgttggtgtatggtgtcaagacaaaacagattcgagatcgagtgctgagcctcttttcacacttaaaaattgctgaatactaa

SEQ ID NO: 382 - DNA, 948 bp, Mus musculus
  MOR29-1
atgcaacacacaaaccacagccatcagaacccaagctccttcctgctcatggggattcccggcctggaggcgtcccacttttggattgcatttcctttctgttccatgtatgccctagcagttcttggcaacatggcagtcctgttggttgtgcgctctgagccttcactgcaccaacccatgtacctgttcctgtgcatgctgtccactattgacctgatactctgcacctccactgtccccaagctcctcgcactcttttgggcaaatgcagctgagattgcctttggagcctgtgctacccagatgttctttatccatggtttctcggctgtagaatccggtatcctgctatcaatggcctttgatcgctacttggccatctgccgaccattgcactacgggtcattgctgtcctcagagtctgtgagcaagttaggagctgctgctctgctccgtggcctggggctcatgaccccacttacctgcctactggcaaggctgagctactgtggccgagtggtagcacattcctactgtgagcacatggctgtggtgaagctggcttgtgggggcacacaaccaaacaacatatatggcatcacagcagccacactggtggtaggaactgactccatttgtattgccatatcctatgcactcatcctccgggctgtgttgggcctctcctccaaagaggccagggcaaagacctttggcacttgtggctcccacctgggtgtcatccttctcttctatacaccagggctcttctcattctatacccagcgctttggtcaacatgtacccaggcacgtccacatcctcctggctgacctctacctcgtcgtgccgcccatgctcaaccccatcatctatgggatgaaaaccaagcagatccgagatggagcactccgactactcaagaggggtcctgcccaatcatag

SEQ ID NO: 383 - DNA, 975 bp, Mus musculus
  MOR41-1
atgctggggccatcctacaaccacacaatggaatcccctggcactttcttcctcttgggcatcccagggtttcagtcttcttatctttggctggccatctcactgagtaccatgtatagcatagctctcttaggaaatatgctcattatcattgtgatctgcatggattccactctacaagagcctatgtacttctttctatgtgttctggctgctgtggatattgttatggcttcttctgtggtacctaagatggtgagcatcttcagttcaggagacagctccatcagctttaatgcctgtttcactcagatgtactttgtccatgcggccactgctgtggagacaggtctgctactggccatggcttttgatcgctacgtggccatctgcaagcccttacattacatgagaattctcacccgtcatgtgatgctgggaattagtgtgactatcaccgttagagctgttatttttatgactcctttgagttggatgttgagtcatttgccattttgtgcctccaatgtagttcctcattcctattgtgaacacatggctgtggccaagttagcatgtgctgaccccatgcccagcagtctctacagtttgattttttcctccatcattgtgggctcagatgtggccttcatttcagcctcttattctttgattctcaaggcagtttttggactgtcctcaaggaatgcacagtggaaggctttgagtacatgtggctctcatgttggggtcatggctctgtactatctccctgggatggcatccatctatgtggcctggctagggcaggaccgagttccactgcacactcaagtgctattagctgacttgtacctgatcatcccacccaccttaaaccctatcatttatggtattaggaccagacaaatccgggagcggatatggagtctgctgacacattgcttcttttcccagtgcactcaaggttcatga

SEQ ID NO: 384 - DNA, 927 bp, Mus musculus
  MOR230-4
atgcagctgaatatcaatgtgacagagttcattcttcttggattgacacaggaccccagcaggaagaacatagtgtttgccattttcctgttcttttatatggggacattactaggtaatttccttatcattgttactattaagacaagcccggcccttgggagtcccatgtacttcttcctgttctacttatccttgtctgacacctgcttctcaacaactgtagctcctagaacaattgtggattccctgctgaaagaggcctctatctctttcaatgagtgcataatccaagtcttcacgtttcatttatttggttccctggagatctttatcctcatcctcatggctgttgaccgctatgtggccatctgtaagcctctgcactatatgaccatcatgaatcgccaggtctgtggaatgctggtggccacagtctgtgtgggatcctgtatacattcatcagttcagataattctggccttgagtttacctttctgtggtcccaatgagattgatcactatttctgtgacttacagccactgttgaaacttgcctgttccgacacatatgtgatcaaccttctcctggtgtccaatagtggaaccctttgtacagtgagtttccttatgctcatggtctcatatatcattattctctattctttgaggaatcacagtgctgaggggaggagaaaagctctgttcacttgtgtctctcatatcatagtagtcattttgttttttgtgccctgcatatttatatacacacgtcctgccaccaccttccctatggacaagatgatatctgtgttttatacaatttgtacacctttcctaaaccctctgatttacacactgaggaatgcagaggtgaaaaatgccatgaggaagttgtggagcaaaaaaatttctgatgatatataa

SEQ ID NO: 385 - DNA, 939 bp, Mus musculus
  MOR172-6
atggcagatgtcaacttcacatttgttactgaatttatccttttgggactgacagatcgtgatgaacttaaggtgtttctctttatattgttccttttgatctatgtcatttccttggtggggaatctgggaatgtttatgctaatccacataactcctaaactccacacacctatgtaccacttccttcgttctctgtcatttgttgatgcctgttattcatcagtatttgcacccacattgctactgaacttctttgttgaaaaagagaccatctcattttctgcatgcatcctgcaatattttttatttgcatcactacttaccacagagggctttctgctggctgcaatggcttttgaccgttatgtggccattgtaaacccactaacctacacagtggttatgacaaaattaatatgtgttctgctagtgttgggatcgtgcttaggaggtactatcacatcattaacacatacaattggattaataaaattgtccttctgtgggcctaatgtcatcagccacttcttctgtgaccttcctcccctgttgaagctttcctgttctgacacatccatgaatgaactgctgcttttggtgttctctggagtcattgccataactacacttttgaccgtggttctctcttatatcttcattgttgctgctattctgaggatccgttcagcggcaggcagacacaaagccttctctacctgtgcatcccatctgacagctgttactttattttatggttctataagtttcagttatattcaaccaagctctcagtactccttagaacaagagaaggtggtatctgtattctatacactggttattcccatgttaaatccattgatttatagtttaaggaacaaagaagtaaaagatgctgtgaaaagagttatggagatcaaacattctctgcattaa

SEQ ID NO: 386 - DNA, 951 bp, Mus musculus
  MOR31-12
atgattacctctaatgtgagcagttacaacccggggcctttccttttggtggggatcccaggcttggagcacttccacgtgtggattggcattcccttctgtgtgatctacatcatagctgtggtgggaaactgtatccttctctacctcatcacagtggagcggagccttcatgagcccatgtttttttttctgtccatgctggcaatgactgatctcatcctgtctacagatggtgtgcctaaaacactcagcatcttttggatgggggctcgagaaatcacatttccaggctgcctcacacaaatgttcttcctccactatagctttgtcctagattcagccattctaatggccatggcatttgatcgctatgtggccatctgttcacccttgagatatgctactatcttgacccccaagactatcgtcaagattgctgtgggcatctccttccgaagcttctgtatcatcttgccagttgtattcttgttgacacgcttacctttctgtaggacacgtatcatacctcacacgtactgtgagcacataggtgttgcccggcttgcatgtgcggatatctccatcaacatctggtatgggttttgtgtccccatcatgacagtcatctcagatgtggtcctcattgctgtctcttatactctcatcttatgtgctgtttttcgcctcccctcccgagatgcacgccagaaagccctgggtacctgcggttcccatgtctgtgtcatcctcatgttttacacacctgcctttttctccatcctcgctcatcgctttggacacaatgtctccctcacattccacatcatgttcgccaatctctacattgttattccaccggcaatgaaccccattgtctacggagtgaaaaccaagcagatcagagaaaaggtcatccttctattctctgtcaagagcatagacggttga

SEQ ID NO: 387 - DNA, 963 bp, Mus musculus
  MOR40-3
atgggtactaagcatgcaaccaacagctcagagttccaagtctctgagttcattctactgggattcccaggcattcatgaattccagatctggttgtccttgcctatggctctactttacatcatagctcttggtgctaatttccttatcttgatcaccatctaccttgagcctaacctgcatcagtcaatgtatcagtttcttggtatcttggctgtagtggatattggtttggctaccaccagcatgcccaaaatactggccatcttgtggtttgatgccaagaccatcagcctccctgagtgttttgctcagatctatgctatccacacttttatgtccatggagtcaggcgtctttctatgcatggcaatagatagatatgtagccatttgttatcccctccagtatccttccatagtcactgaagcttttgtaatcaaagccacattgtccatgatgctcaggagtggcctgttaaccatcccagtgcctgtactagctgcccagagacaatactgctccaggaatgaaatagaccactgcctttgctctaacttgggggtcattagtctggcctgtgatgatatcactgttaacaggaactgccagttgacattggcctggttgatacttggaattgacatgattctggtctgtgtttcctatgctttgattattcgctcagtgctgaggctgaactccactgaggcagtatctaaggccctcagtacctgcagttcccacctcatcctcattatgttttactacacagctattgttattctatctgttactcacctagcaggaagaagggttcccctcatccctgttctcctcaatgtgatgcatattgttatccctccatcccttaaccccatggtatatgcccttaggacacaggagctgaaggtgggcttccggaaggtttttgacttgagtcattatgtgtccaggaagtaa

SEQ ID NO: 388 - DNA, 933 bp, Mus musculus
  MOR161-4
atgactgccaagaattcctctgtgacagagttcatccttgcaggcctgacaaaccaaccaggactccgcatgcccctcttcttcctgtttctaggtttctacatggtgactgtggtggggaacctgggtttgatctccctgattgggctgaactctcaccttcatacccctatgtacttctttctcttcaatctttctgtaatagatttctgttattcctccactatcatcccaaaaatgcttacaagttttatctcaaagacgaatatcatctcacactcagggtgcatgacacagttgtttttcttctgtttctttgttttctctgagtccttcattctgtcagccatggcatatgaccgttatgttgcgatctgtaaccccctgatgtacacggtcaccatgtctccccaggtatgtttacttcttttgctgggagtctatgtgatgggcttctctggaggcatagcccatacagggaacctcatgaatctgacattctgtgctgacaacctcatcaatcacttcatgtgtgacattcttccccttcttgagctctcctgtagcaacaccttcacaaatgagcttgtagttttcattgttgtggcatttggtattggtgtgcccattgtcaccatcttcatttcttatgccctcatcctctctagcattctttacatgcattccacagagggcaggtccaaggctttcagcacctgcagctcccacttgattgtggtttgtcttttctttggttctggggctttcatgtacctcaaacctccttccattttgccccttgaccaaggaaaagtgtcttccttgttttatacaattgtggtgcccatgttgaaccctctgatctatagcttgagaaataaagatgtcaaagttgctctgaggaaaaccttgggtaagagaattctttcttaa

SEQ ID NO: 389 - DNA, 960 bp, Mus musculus
  MOR40-4
atgttccagatcctcagagattccaacagctctaggttccaggtgtctgagttcattctcatgggatttccaggtatccacagctggcaacactggctctccctccccctggctctgctctatgtcttggctctcattgccaacatacttattgtgactgtcatttaccaagaggcatcactacaccagcctatgtaccatttcctgggcattcttgctattgtggacgtgggtctggcaactactatcatgcccaagattttagccatcttatggttcaatgataacaacatcagcctccctgagtgctttgctcagatgtatgccatccattgctttgttgccatggagtcaggcatctttgtctgcatggctatagataggtatgtggcaatttgcaaaccactgagatactcttcaatagttactgaatcttttgtggtcaaagcaactgtgataatggccatcagaaattttgtggctcccatgtcagtacctgtgttggctgctcagagaaattactgttttcagaataaaattgaacactgcttgtgctctaaccttggggtcactagccttgcctgtgatgacaggaaaatcaacagcatcaaccagctcttcctggcttggacactcatggggagtgaccttgctttgattatgatttcctatgctttgattcttcggtctgtgctgaggctgaactctgcagaagctgcatctaaagccttaagtacctgtacttctcacctcatcctaatctttttcttctacacagtcattgttgtcatatccatcactcatagtgtaggaataaaaattccactcatcccggttctgctgaacgtgctgcacaatgttattccccctgctctgaaccccatggtgtatgcacttaagaataaagagctcaaacaaggcttatacaaggtgctcaggctggatgtcaaagaaggctaa

SEQ ID NO: 390 - DNA, 921 bp, Mus musculus
  MOR171-10
atggaaaaaggcaatcaatccacagtgaacaaattcttcctttctggcttaacagaacaaccagaactgcaactgccactcttcctcctctttcttggaatctacctgctcacagtgctggggaacctgggcatgatcatcctgatcctgctcagctcgtacctgcacacccctatgtacttcttcctcagtagtctgtccttcattgacttctgccaatctactgtcattaccccaaaaatgctggtgaaatttgtgagggagaagaatgaaatctcctaccctgagtgcataactcaactttgcttctttgtcatttttgctgtttcagaaagttacatgctggctgcaatggcatatgatcgctatgttgccatctgtagccccttactttacagtagcatcatgtctcaacataagtgcctttctctcgttttaggagtttacattctaggcatagtttgtgcatcagctcatgtaggatgtatatttaggattgatttctgcaaatctgatttgatcaaccattatttctgtgaccttatttctattcttaatctctcatgctctaatatttttgtgaatgatctcgtaattctaatttttagtctaattaataccattttcccaaccctgaccatcctcagttcttatgctttcatcattatcagcatcctacgcattaaatccactgagggaagatctaaagccttcagtacctgcagctcccacatctcagctgttgctatcttttatatctctgctggatttacgtatctgaacccatcatcttcccattcgatggatgaaggaaaagtgtcttctatattttacaccatcattgttcccatgctcaaccccctgatttacagtcttaggaataaggacgtgaaaattgctctgaagaaaatgattgaatga

SEQ ID NO: 391 - DNA, 927 bp, Mus musculus
  MOR171-11
atggaacaaggaaatcactccacagtgaaaaaattcttcctctctggcttaacagaacaaccagaactacagctgccactcttcctcctctttcttggaatctacctgctcacagtgctggggaacctgggcatgatcatcctgatcctgctcagctcacacctgcacacccccatgtacttcttcctcagcagtctgtccttcattgacctctgccaatctactgtcattaccccaaaaatgctggtgaattttgtgagggagaagaatgaaatctcctaccctgagtgcataactcaactttacttctttctcctttttgctatttcagaatgttacatgctggctgcaatggcatatgatcgctatgttgccatctgtagccccttactttatagtagcattatgtcccaacataagtgcctttcaattgttttaggagtttacattataggcatagtttgtgcatcagctcatgtagggtgtatgtttaggattgatttctgcagatatgatgtgatcaaccattatttctgtgaccttatttctatccttaagctctcgtgctctgatgcttttgttaatgagttgatgattttaatttttagtggagttaatattattgccccaacgctgaccatcctcagttcttatgttttcatcattatgagcatcttacgcattaaatccactgagggcagatctaaaaccttcagcacctgcagctcccacatctcagctgttgctgtcttttatggttctgctgcatttatgtatctgaacccatcttcttccaattctatggatgaaggaaaagtgtcttctatattttacaccattattgttcccatgctcaaccccctgatctacagtctgaggaataaggatgtcaatattgctttgaagaaaatgatacaaagaagataa

SEQ ID NO: 392 - DNA, 936 bp, Mus musculus
  MOR171-12
atggcagaaggaaatttctccgttgtgactgaatttatcctcactggattaacagagaagccagcgctacagctgcccctgctcttcctcttcctaggaatctatgtggtcacagtcataggaaacctgggcatggtcatgctcatcctgttctcttctcacctgcacacccccatgtactttttcctcagtaatctgtctttcgttgacctctgccagtccagtgtcatcatgcccaaaatgctggagaaatttgtcatggtgaagagtgtcatttcttatgcagaatgcatggctcagttttacttatttgatgtttttgctgtttcggagtgtcacatgctggctgtcatggcttatgatcgctatgttgccatctgtaaccccttgctatataatgttaccatgtcttacaaagtgtgttcctggatggtagtgggggtgtatagtgtaggcttgatttgtgccacaggggaaacagtctgcctgcttagactgcttttctgcaaagctggtgacataaaccactacttctgtgatcttttaccactcctggaacaatcctgttccaatacatttatcaatgaaatactaggactgtccttcagttcatttaatattactgtcccagctctgaccatcctcagttcctacatcttcatcatagccagcatcctccgcattccttccactgaaggcaggtccaaagccttcagcacctgcagctcccacatcttggctgttgctgtcttctttggatctctagcattcatgtaccttcagccatcatcagtcagctccatggaccaagggaaagtgtcctctgtattttataccattgttgtgcccatgctgaaccccttgatctatagtctgaggaataaagatgtcaaagttgccttctataaggttgtaggaagaagagaattcatgtga

SEQ ID NO: 393 - DNA, 927 bp, Mus musculus
  MOR256-8
atggagaagtccaacgacagctctgagtatggtttcatcttagaaggcttctctgatcgccctcgcctggagatggtactcttcatagtaaattttactctgtattcggtggctgtgctgggaaatataaccattatcctggtgtgtatattggaccctcggcttcacactccaatgtacttctttctggcaaatctttcatttctggatctctgcttcagtaccagctgcatcccacagatgctggtaaacctctggggcccagacaagaccatcagctatgctggctgtgtagtccaacttttctccttcctgtcgattggcagtgtagaatgcatccttctggctgtcatggcttatgaccgctatgctgccgtctgcaaacctttgcactatatggtcattatgcacccacagctgtgtgtgaggctgatggctgtggcctggggggttggactcgccaatgccatcatcatgtcaccactagcaatgaccctgtccagatgtggccgccggagaattaatcatttcctttgcgaaatgccagctctgatcaagatggcctgtgtggatgctcgcccggtggaaatgttgtccttcactttggccatccttattgtcctgctacccctcactctgatccttgtctcctatggttacattgctgcagctgtgctgaggatcaagtcggctgctgggagatggaaagccttcaacacctgcagctcccacctcactgtggtctccctgttctatggaagtatcatctatatgtatatgcagcctggaaacagctcttcccaggaccaagggaaatttctcactctcttctataacttggtgactcccatgctgaatccactcatctacactttaaggaacaaggaaatgaaaggggcattgaaaaaggtgtgtgggaggcactga

SEQ ID NO: 394 - DNA, 951 bp, Mus musculus
  MOR204-7
atgggtatcctgaaggatgggaaccacactgcagtgacagagttcattttattgggtttaacagatgacccagtccttaaagttgtcctcttcaccatcatcctgtgcatctacctggtgactgtgtctgggaacctcagcaccatccttctcatcagagtctcttcccagctccatcaccccatgtacttttttctcagccacttggcttctgttgacataggcatttcatcttctgtcacacccaatatgcttgtcaacttcctgctggagagaagcacaatctcctaccttggatgtggcatccagcttggctcaggtgctttttttggatcaactgagtcatttcttctggctgccatggcttatgatcacttcatggcaatctgtaacccactactttattccaccaaaatgtccacacaagtctgtatccagttgctagtgggatcttatatagggggttttcttaatgcttcctcttttatactttccttcttttcttttctcttctgtggaccaaataaagtcaatcactttttctgtgattttactcctttagttgaactctcctgttctgataacagtgtcctgctaattcttgattcattttctgctggctccatcattgtgatcacagtgttggtcatagccatctcctacacctacatcctcatcaccatcctgaagatgcactccactgagggtcgacacaaggccttttccacctgcacctcccacctcacagcagtcactgttttctatggaactgtcacattcatttatgtgatgccaaagtccagctactccacagaccaaaacaaggtgttgtctgtgttttacatgatagcgatagcaatccccatgttgaaccccctaatctacagccttaggaataatgagattaagaatgctctgaagagacagcttagtaaaaaaacattttcttag

SEQ ID NO: 395 - DNA, 945 bp, Mus musculus
  MOR245-1
atgctaatggggggagcaaacctctctgtggtatcagagtttgtatttcttggactcaccaactcctgggacatccagcttcttctctttgtgttctcctctgtgttttatgtggcaagcatgatgggaaactcactcatcatttttactgtggcttcagaccctcacttacacactccaatgtactttctgttggctaacctctccttcattgacttaggtgtttcttctgttacctcacccaagatgatttatgatctgttcagaaagcacaaagtcatctcctttacaggttgtgttattcagatcttctccatccatgttattggtggtgtggagatggttttactcatcgccatggcttttgatagatatgtagccatatgtaaacctctccattacctgaccattttgagcccaagaatgtgtctcttctttgtagttattgcttggatagttggccttatacactctctggctcagctggtttttgtcataaacttacctttttgtggaccaaatgtgttggacagcttctactgtgaccttccccggttcatcaagcttgcttgtgtagatactcataaactagaattcatggtcacagccaatagtggattcatctctgtgggctccttcttcatattgatagtttcatatattgtcatcataatctctgtacaaaagcactcttcaggtggtttctctaaagccctgtccacactttctgctcatatctcagtagtggttttattctttggtcctttgatatttgtctatacatggcctactccctccgtacacctggataaatttctggccatatttgatgcagtcatcactccttttctgaatcctgtgatctatacattcaggaatcaagaaatgaagatggcaatgaagagagtgttcaaacagctactgagttatagaaagatatcttaa

SEQ ID NO: 396 - DNA, 945 bp, Mus musculus
  MOR212-1
atggctgggaggaattacaccttcgtgactgagttctttctgactgcattcactgaacatcctgagtgggggctccctctcttccttttatttttgagtttctacctcgctaccctgctggggaatacaggaatgatcattctaatccagaagaaccgccgacttcaaacaccaatgtacttcttcctcagccacctttcctttgtggacatctgctactcctctgtcatcatccctcagatgctggctgtgctgtgggaacatggctcaaccatttctcaagttcgctgtgcagttcaattcttcctctttaccttctttgcttctattgactgctacctcttggcaatcatggcctacgaccgctatgtggctgtgtgccaaccattgctttatgtcaccatcatgactgagaaggcccgtgtaggtctggtaactggggcatatgtggctggtttttccagtggctttattcggactgtcacagccttcactctttcattctgtggaaacaatgagatcaatttcatattctgtgacctccccccattgttaaaactcgtatgtggggacagctacattcaagaggtggtgataattgtttttgccatttttgtcatgcctgcttgcattgtggtgatctctgtgtcctatctgtttatcattgtggccattatgcaaatccgctcagctggaggccgagccaaaactttctctacctgcacctcccacctcactgctgtagctctcttctttggtactcttatcttcatgtacttgagagataatacagatcagttctcggagagggacagagttgtgtctgtgttctatacagtggtgaccccattactgaatccactcatctatagcctgagaaataaagaggtaaaagaggcaattacgaaatctctgagaagatcaaagatttccagggcaccctag

SEQ ID NO: 397 - DNA, 990 bp, Mus musculus
  MOR266-3
atgatttcttttaatataaggagaatatttgtggtttcaatgacctgggagaaccactcagtgttgatggagtttgtgttccttgcctatcccaatcgcctagaacttcgtatgttctgcttccttggaataagcctggcttatgcattgatcatctctgggaatatcctcattatggtctccatccagacagaaacacgtctacattcacccatgtactatttcctgggcagcctatcaggaatagagctatgttacactgcagtggtggtgccacatatcctggcaaacaccctgaagtcagagaaaaacattactctgctgagctgtgccactcagatggtcttctttattggacttggtagtgctgactgcttcctcctggcttccatggcctatgacagatatgttgccatctgtcatcctttacagtaccctctcatcatgactgtaacactttgtgttcgcttggttttggcttcggtggtcattggcttggtcttgtccttacagcttgtggtcttcatcttctgtctaccattctgtcaggacagaggaatagaacatttcttttgtgatgttcctccagtgatgcgtctcgtgtgtgccacaagtcatatccatgagctctctgtgctagtggccgccgcattagccattgctgtacctttctttttcattgcgactacatatgccttgatagtggctgctgtgctcaaactccactcagcagctggtcgtcacagggccttcaacacctgttcttcccacctcactgtggtattgttgcagtatggctgctgtgccttcatgtacctgcgcccgaactctagctaccaccccaagaaagatcagttcatctccctggtgtacacactgggaaccccattcctcaaccctctcatctacactctgaggaacaatgaaatgaaaggggccatagagaaggttcttaccagaaattatttctcccagaaaaatatacaatag

SEQ ID NO: 398 - DNA, 945 bp, Mus musculus
  MOR204-8
atggctttcctggaggatgggaaccacactgcagtgacaggattcattttattgggattaacagatgacccagtccttagagttgtcctctttgtcatcatcttgtgcatctatctggtgactgtgtctgggaacctcagcaccatccttctcatcagagtttcttcccagctccatcaccccatgtacttttttctcagccacttggcttctgctgacataggctattcatcttctgtcacacccaatatgcttgtcaacttcctggtggagagaaacaccatctcctatctaggatgtggcatccagcttggttcagctgttttctttgggacagttgaatgtttccttctggctgccatggcttatgaccgatttatagcaatttgtagcccactgctttattcaaacaaaatgtccacacaggtttgtgtccagctgcttgtaggatcttatatagggggttttcttaatgcctcctccttcacactttccttcttttctcttgtgttttgtggaccaaacagagtcaatcactttttctgcgattttgccccattagtaaaactatcttgttctgatgtcagtgtccctgcagttgttccctcattcacagctggctccatcatcattgtgaccatatttgtaatagctgtctcctacatctacatccttatcaccatcctgaagatgcgctccactgagggccgacagaaggctttctctacctgcacctcccacctcactgcagtcactcttttctatgggaccatcacattcatttatgtgatgcccaagtccagctactccacagaccagaacaaggtggtatctgtgttctacatggtggtggtccccatgttgaaccccctcatctacagcctcagaaataaagagattaagggtgctctgaaaagacagttggctaaaaatacattttcttag

SEQ ID NO: 399 - DNA, 945 bp, Mus musculus
  MOR204-9
atggctttcctggaggttgggaaccatactgcagtgacagagttcattttattgggattaacagatgacccagtcctcagagttgtactcttcactatcatcctgtgcatctacctggtgactgtgatgggaaacctcagcaccatccttctcatcagagtctcgtcccagctccatcaccccatgtacttttttctcagtcacttggcttctgttgacatgggcctttcatcatctgtcacacccaatatgcttctcaacttcctgattgagagaaataccatttcctaccttggatgtggcattcagcagagcctggctgatttctttgggtcagttgaatgcttccttctggctgccatggcttatgatcgcttcatggcaatctgcaacccgctgctttattccaccaaaatgtccacaaaagtctgtgtccagttggttgtaggatcttatatagggggtttccttaatgcttccctcatcatgttttactttttctcctttctcttctgtggaccaaatagagttgatcattttttctgtgattttgctcctttggtggaactctcctgttctgatgtgagtgtctctgtaattgttatctcattttctgctggctcagttactatgatcacagtgtttgtaatagctgtctcctattcttatattctcatcaccatcctgaagatgcactccattgagggcagacacaaggccttctccacctgcacctcccacctcactgcagtcactctttattatggcaccattacattcatttatgtgatgcccaagtccagcttctccacagaccagaacaaggtggtgtctgtgttctatatggtgatgatccccatgttgaacccacttatctacagcctcaggaataatgagattaagggtgctatcaagagacagcttggaaagaaaatgtcctgctag

SEQ ID NO: 400 - DNA, 945 bp, Mus musculus
  MOR204-10
atggctttcctgcaggatgggaaccacactgcagtgacagagttcattttactgggattaacagatggcccaatcctcagagtcatcctctttaccatcatcttgtgcatctacctggtgactgtgtctgggaacctcagcaccatccttctcatcagagtctcttcccagctccatcaccccatgtacttttttctcagtcacttggcttctgttgacatgggcctttcatcttctgtcacacccaatatgcttgtcaacttcctcgtaaagcaaaataccatctcctacattgcatgttctattcagtttggcttagctgctttctttgggacagttgaatgctttcttctggctgccatggcttatgatcgctttgtagcaatctgcaacccactgctttattccacaaaaatatctacagagtcctgtatccagttagtcgtgggatcttatataggtggctttcttaatgcttcttccttcatcctttcattcttttcttttatcttctgtggaccaaataggatcaatcacttttactgtgatttggctcctttggtggaactctcctgttctgatgtgagtgtctctgtagttgttacctcattttctgctggttcagtcactgtgatcacagtgtttgtcatagctgtctcctattcttatattctcatcaccatcctgaagatgcactccactgagggcagacacaaggccttctctacctgcacctcccacctcactgcagtcactctttattatggcaccattacattcatttatgtgatgcccaagtccagctactccacagaccagaataaggtggtgtctgtgttctacatggtggtcatccccatgttgaaccccctcatctacagcctcaggaataatgagattaagggtgctatcaagagacagcttggaaagaaaatgttctgctaa

SEQ ID NO: 401 - DNA, 933 bp, Mus musculus
  MOR204-11
atggaacctggaaaccacactgcagtgacaaagttcatccttttggggttaacagatgatcctacactctgtgtcatcttctttgtgttttttcttggaatatacattgtcaccttagtaggaaatatcagcataataaatttagtaagaagctgtcctcagctccaaacccccatgtacatgtttcttagccatctggcttttgtggacattggctattcaacatcagttacacctataatgttaataggattcattgtacatgaaacaggcctccctgtgcatgcctgtgaagcacaactctgttctgttgtgacttttgggacagctgaatgcttcctgctggctgccatggcctatgacagatatgttgctatttgctctcccttgctctactccacacatatgtcttcccaaatctgtctcctcttagttggggcatcctatgtgggtggctgtgtgaatgcatggacatttactggctgtttgttaagtctgtccttttgtggaccaaataagatagatcacttcttctgtgatttctcccctttgttgaaactttcatgctcagatgtctccattattggaatcatcccctctatctctgctggctccattattgtagtgacagtgtttgtcatatctgtctcctacatctacatccttatcaccatcctgaagatgcgctccactgagggtcgccacaaggccttctccacctgcacctcccacctcactgcagtcactctctactatggaactattactttcatttatgtgatgcccaagtccagctactcaactaagcagaacagggtggtgtctctgttctacacagtggtgatccccatgttgaatcccctcatctatagtttgaggaacagagatgttaaggaagcgctgaggaaggcaactcttagaatatattcatag

SEQ ID NO: 402 - DNA, 948 bp, Mus musculus
  MOR204-12
atggctttcctgcaggatgggaaccacactgcagtgacagagttcattttattgggattaacagatgacccagtcctcagagttgtcctcttcaccatcatcttgtgcatctatctggtgactgtgtttggcaacctcagcaccatccttctcatcagagtctcttcccaactccatcaccccatgtacttttttctcagccacttggcttctgttgacataggcatttcatcttctgtcacacccagtatgcttgtcaacttcctgttggagagaagcacaatctcctaccttggatgtggcatccagcttggctcagctgatttcattgcatccgttgaatgcttccttttggctgccatggcttatgatcgcttcatggcagtctgcaacccgctgctttattccaccaaaatgtccacacaagtctgtgtccagctggttgtgggatcttatatagggggtttccttaatgcttccctcatcgtcacagtttactttttctcttttctcttctgtgggccaaatagaatcgatcattttttctgtgattttgctcctttagcagaactctcctgctctgatgtcagtgtctctgtacttattatctcattttcggctggctcagttactatgattacagtgtttgtcatagtcatttcctattcctacatcctcatcaccatcctgaagatgcactccactgagggccgacataaggccttctccacctgcacctcccacctcactgcagtcactctttattatggcaccattacattcatttatgtgatgcccaagtccagcttctccacagaccagaacaaggtggtgtctgtgttctacatggtgatgatccccatgttgaatcccctcatctacagcctcagcaataatgaaattaaaggtgctctgaagagacagcttggtatgaaaacactttcttaa

SEQ ID NO: 403 - DNA, 945 bp, Mus musculus
  MOR204-13
atggctttccaggaggatgggaaccacactgcagtgacagagttcgttttatttggattaacagatgatccagttcttagagtcatcctcttcatcatcttcctgtgcatctacctggtgactgtgtctgggaacctcagcaccatccttctcatcagagtctcttcccagctccatcatcccatgtactttttcctcagccacttggcttttgctgacataggttactcatcttctgtcacacccaatatgcttgtcaacttcctggtggaaagacatacaatctcctacattggttgtgccatccagctaggttctgttgtcttctttggatcaagtgaatgcttcattctggctgcaatggcttatgaccgcttcatggcaatttgcaacccactgctttattctaccaaaatgtccacacaagtctgtgtccaattgctcttaattgcttacataggtggttttcttaacacatggtctttcactatatgtttctattcgttagtcttctgtggacccaatggtgtcaatcactttttctgtgattttgctccattaatagaactttcctgttccgatgtcagtgtccctgcaactgttccttcattcacagctggatccatcattgttgtgacagtgatcgtcatagccatctcctacatctacatcctcatcaccatcttgaagatgcactccactgagggtcgacagaaggccttctccacctgcacctcccacctcacagcagtcactctgttctatgggaccatcacattcatttatgtgatgcccaagtccagcttctccactgaccagaacaaggtggtgtctgtgttctatatggtagtgatccccatgttgaatcccctcatctacagcctcagaaacaatgagattaagggtgctctgaagagacagataggcagaaaaatattttcttag

SEQ ID NO: 404 - DNA, 972 bp, Mus musculus
  MOR204-14
atggctttcctggaggatgggaaccacactgcagtgacagagttcattttggtgggtttaacagatgacccagtccttaaagtcatcctcttcaccatcatcctgtgcatctacctggtgactgtgtctgggaacctcagcaccatccttctcatcagagtctcttcccagctccatcaccctatgtactttttcctcagccacttggcttctgttgacttaggctactcatcttctgtcacacccaatatgcttatcaacttcctggcagagaataataccatctcctacattggatgttctatacagttcggctcagctactttctttggagtacttgaatgcttccttctggctgtcatggcttatgatcgctttgtagcaatctgcaacccactgctttattccatcaaaatgtccacacaagtctgtgtcaagttggttgtaggatcttatatagggagttctctaaatgcttcctttgtcactgtttctatatttaatttgctcttctgtggaccaaacaaaatcaatcactttttctgtgatttcgatcctttgattgagctctcttgttctgatgtcagtgtccctgtggctgttacctcatgttctgctggcttaattactatgattacagtgtttgtcatagccgtctcctatacctatatcctcatcactgtcctgaagatgcgctccactgagggccgccacaaagccttctccacctgcacctcccacctcacagcagtcactctgttctatggaactgtcacattcatttatgtgatgcccaagtcaaattactctacagaccagaacaaggtggtgtctgtgttctacatggtggtgatccccatgttgaaccccctcatctacagcctcagaaacaatgagattaagggtgctctgaagagacagcttggtaagaaaatattttctcagagtaatatattgttttgtaaaagttaa

SEQ ID NO: 405 - DNA, 945 bp, Mus musculus
  MOR204-15
atggctttcctggacaatgggaaccacactgcagtgacagagttcattttacttggattaactgatgacccattccttagaattgtcctcttcagcatcatcctgtgcatctacctggtgactgtgtttggaaacctcagcaccatccttctcattagagtctcttcccagctccatcaccccatgtacttttttctcagccacttagctactgttgacctaggcatttcatcttctgtcactcccagtatgcttgtcaacttcttggcggagagaagcacaatctcctaccttggatgtggcattcagctcagctcagctgctctctttgggacacttgaatgcttccttctggctgtcatggcttatgatcgcttcatggcaatctgcaacccactgctttattctaccaaattgtccacacgattctgtatccagttggttgtgggatcttatataggtgcatttcttaatgattcctgctacatcctttcctttgctttttttctcttctgtggaccaaataaagttgatcactttttctgtgatttatctcctatgatggaactctcctgttctgatgcgagtgtctctggagttgttatctcatttactgctggctcaatcactatgaccacattgattgttatagtcatatcttatttctatatcctcatcaccatcctaaagatgcgctccactgagggtcgccaaaaagccttctccacctgcacctcccacctcactgcagtcactctctactatggaactatcatattcatttatgtgatgccaaagtccacctactccagggaccagaacaaggtagtgtctctgttctacatggtggtgatcccaatgttgaatcccctcatctacagcctcaggaataatgaaattaagggtgctctgaagaagcaattttataggaaaacattgttatag

SEQ ID NO: 406 - DNA, 948 bp, Mus musculus
  MOR23-1
atgggctataccaacttgtcatacctgaacccagggacagtgattctgattggcatccctggactggagcatgtgcagttttggattggatttcccttctttgttgtatgccttgtggctttgctgggaaacctcttcctgctaatcattatccccacagaacgcagtctacaccaacccatgtacattttcttggcagtactcgcagctactgaccttggtctctgcctagccattgcccctaagatgttggccatcttctggtttggctcctgttccatggcttttgatgcttgcctcacccagctcttcttcatccatgccttgcaaggaatggaatctggcgttctgcttgccatggcctttgaccgatatgtcgccatctgcgatcctctgaggcacacagccgtccttacacctttatttttacttagagtcgttctggtggttgcaattcgggcaactgtactcgttggggttttacccattctcctcaagcgactgcaatggttccactctgttgtgattgttcattcttactgtgagcacatggctgtagtcaagctggcggcagaagatgtccgtataaataaatcatatgggctctttgtggcttttgcaattctaggttttgacatgatatttgttttcatctcctacattttgattttccgagctgtttttcgtcttcctcagaaagaggcacgaagcaaagcattcaacacttgtacggctcatattgttgtcttcctggagttttatatccttgcctttttttcctttttcagtcaccgttttggtcacgtatcaccgtatgtccacatcttattgtctaccatctatctacttctgcccccggcccttaaccccattgtgtatggtgtgaagaccaaggagatccgcaaatgggttgtccaaatttttgttctgaagtctaatactcagtaa

SEQ ID NO: 407 - DNA, 927 bp, Mus musculus
  MOR179-1
atgaaaaacatcacagaagctactttctttgttctcaagggactcacagacaacaatgaacttcagatcattctctttttcctcttcctagcaatttacctttttactctaataggaaatgtaggacttattattttagttgttggtgatccccaactccacaaccctatgtactgtttcctcagtgcattgtcttttgtagatgcttgctattcttcagatatcactccaaatatgttagtaggctttatgtctaaaagcaaaatcatttcattttatggttgtgcaacacagatgtttcttgctgttacatttggaaccacagaatgctttcttttggcagcaatggcttatgaccgatatgtagccattcacgacccactactgtatgcagtgagcatgtctcctcgagtctatttaccactcatcattgcttcctatgctggtggaattgtgcatgctatcatccacacagtggccactttcagcctgtctttctgtcagtccaatgaagtcaaacatatattctgtgatataccacctctacttgctatttcctgctctgaaacttatgtaaatgagctcttgctcttcttctttgtgagtttcattgagctagtcaccatcctgatcattctgttttcctatgcttttatcctgttgtcaatcctgaagatgaattcagctgaagggagaagaaaagtcttctctacatgtggatctcacctcactgctgtgtccatttgttatggcacaagcctcttcatgtatgtaagacctagttccaactattccctggagcatgacatgatagtgtctacattttataccattgggattcccatgctcaaccccatcatctacagtctgagaaacaaagatgtaaaagaggcaataaaaagagttttgagaaaaaatttcatataa

SEQ ID NO: 408 - DNA, 960 bp, Mus musculus
  MOR110-3
atgaagaaccaatctgtagagattatattcattttgcttggactgacagatgaccctcagctacaaattccaattttcctgtttctgtttttcaattacatcttgagcctgatgggaaatttagtgatcatccttctcaccctgctggatcctcgcctcaagactccaatgtacttcttcctccggaatttctccttcttagaaattgcattcacaactgcctgtattccacggttcttaatgagtattctcactggagacaggacaatttcctacaatgcgtgtgcagctcaattattcttcttttttctctcactaatcacagagttctacctcctggctgccatgtcttatgaccgctttgtagccatctgcagaccactacactaccccatcatcatgaacagcaaagtgtgccatctactggttctcagctcttgggttactgggttctttgtcatcttcccccctttactcttgggactcaaactggatttctgtgcttccaaaacaatagaccacttcctgtgtgacacttcccctgtcctgcagctgtcttgcacagacacacgtttcatagaattgatggctttcgccttagctgtcatgacacttatcatcaccttgattttagtgatcctctcctacacactcatcatcaaaaccatcttaaagttcccttcagctcaacaaaggaaaaaggccttttccacctgctcctcacacatggttgttgtctccatcacatatgggagttgtatcttcatgtacatgaaaacatcagccaaggagagggtgagcttaaataaaggtgtagctgtgctcaacacctctgtggcccctttgctaaaccctttcatttataccctaaggaaccagcaggtgaaggatgctttcaaacaggtgcttcacagaatgtgttattcccaaaacagtgaattaagatttagacctaaatag

SEQ ID NO: 409 - DNA, 936 bp, Mus musculus
  MOR114-6
atgagaaaccgaacagtaacaaccttcattttgttgggtctcacagatgatattcggctgcaaattctgctttttatctttctgctttcttcttacatgttgagtttatctggtaacctaaccatcatcacactcactctgattgacccccaccttaaaacacctatgtatatttttctcaaaaatttctccttcttagaaatttcactcacaactgcttgtattccaagatttctatacagcatatcatctggggacaagtccattacctatattgcttgtgccagtcaactgttgtttatagacctctttgcagttacagaattttttctcctggctatcatgtcttatgatcgatatgtggccatctgtaaacctcttcactacatgaccatcatgaatagcagagtctgcaagaacttcatcttctcctgttgggtagcagcactgatcatcattctcccaccaattggtctaggtttgggcctggaattctgtgactcagatatcattgatcatttttgttgtgatgcagctcctctcctgaaaatctcttgttcagacacatggctgatagaacagatggtgatagctggagctgtgttgacattcatcatcacctttgtgtgtgttgtcctttcctatgtttatatcatcaagaccattctgagatttccctctgccaagcaaaggaaaaaggccttttccacctgttcttcccacatgattgttgtttccattacttatggtagctgcatcttcatttatgtcaaaccttcatccaaggacgatgtagctatcaataaagggatttcacttcttatcatatcaatttcaccaatgatgaatcccttcatttatgcactgagaaacaagcaagtaaagcaagctttcaattactcaattaaaaaaattgcattcctctcaaagatgtaa

SEQ ID NO: 410 - DNA, 900 bp, Mus musculus
  MOR111-2
atgaaaaaccactctgttatcaccgagtttctgctcttgggcatatcagacacaccagaacttcagtttgtgatttttatctttttattcattgcttacatattaagtgtcactggaaacctaaccatcatcatcctcacattgctagactctcagttaaagactcctatgtactttttcctccggaatttctccttcttagaaattatattcaccagtgtttcaatccctagatttttggagtcaataattactaaagttaagactatttcctataacaactgtttggctcagttatttttcttcatctccatgggagtgtctgagttctttcttctaactgctatgtcttatgatcgctatgtagccatctgcaagcctctgcactacaccctcatcatgaatcagaaagtctgcacccttcttgtcctcacctcatggctgggagggtttctgaccatctttccattgctcatgctgtttctcaagttagatttttgtgcttcaaatgtcattgatcatttctgctgtgactacttccccatcttacagctctcctgctcagatacatggtttttagagacaatcggcttttactttgcatttattactctgctgttcacactggctctagtgatcttgtcatacatctgcatcatcaacaccattctgaggttcccatctgccagtcagaggaaaaaggctttctccacctgttcctctcacatgattgtcatctccatctcttatggcagctgcattttcatgtatgtcaaaccttctgcaaatgaaagagcatcactgaccaaaggggtggctcttctcaatacttcaattgctccccatgctgaacccttttatttacaccttgagaaatcaacaagtaaaacaagcttcaag

SEQ ID NO: 411 - DNA, 972 bp, Mus musculus
  MOR15-1
atgcttcatgtcaacatcaccaaccccatcttctccaccttcctggttacaggcattccagggctggaggcagtgtacatctggatagccataccattctgtgccatgtttctcatcactatggtgggcaacatgaccatcataattgttatctggcatgagcagactcttcatgttcctatgtatctattcctggccatgttagcctcctctgatctgggtctctctctgtttaccttccccacactgttgagaatcttcctgctgaatgatagagagttgaccaccactgcttgtttcacgcagatgttcttcattcatacttttcaactccttgaatcagctattattctggcaatggccttcgattggtatgtggccatttctcacccacttcactatcactccattctcacagacactgtgattggcaagatagggttaactattgttggacgaaccttaactctgcaggtgcctgcccctatcctcttgaggaggctctacttttgtagttccaatgtactatctcattcctactgtttgcatcctgacatcataaagctctcctgctccagtactactgtcaacagtatctttggactctttgtggtgctctccaccttgggacttgacttcctcctcatcttactctcatatgcattgattctgaaaacagtactgaatatggcttcccacagtggccgcctcaaggctctcaacacctgcatctctcatctgtgtgctgtggtcctcttcttcacacccatgatctgcctatccatgctgcatcgttttggtccaaggcttccctcacatgtctatgtgaccctggccaacatgcactttctaattcctccagtgatgaaccccatcgtctatgtggtgaaaaccaagcagatccgtgacaaaattcagaaactcttcattagaaaagcaacaaagaaagctcaggctgcatctataacataa

SEQ ID NO: 412 - DNA, 933 bp, Mus musculus
  MOR268-1
atgggacagaatgacagctctgtggttgagttcatcctgttgggattttctcacttccctgaactccaagtacacatgtttggagctttcttagttatttatctggtgactctgacaggaaatgccaccattgttactgtcatctttctggaccacagcctacatatccccatgtacctgttcttgcagaacttgtctgtggtggaagcaagcttcagcacaactgttatgcctgagatgctggtggtcctgactagtgagaaagcaaccatttcctttgggggttgttttgcgcagacatatttcattcttctctttggtgggactgagtgttttctcctgggggcaatggcttatgatcgatttgctgcaatctgctaccctctaacctacccaatgattatgagcaaaaggatctttgtgaaattggtggtgtgctcatgggtcttgggtatcatgacagctactgtgtcggtcacatgggtgtttagcttccccttctgtggtcctagtaaaattaatcatatatcatgtgaagtcccagcagtgctggagcttgcctgtgcagacaccttcctgtttgaagtctattccttcacaggcaccattttgcttgtcctggtccccttcctgttgatacttttgtcttatactcaaattctcttcaccgtcctgaggatgccatccactactgggagacagaaggctttttccacatgtgcctctcatctcacctctgtcaccctcttctacagcacagcatgcatgacttatctacagcccaaatccaagtactcaccagacaccaagaaactgatgtcattggcttactctctgctcacccctctgctgaatccacttatctacagcctgagaaacaaggagatgaaaagggctgtggtaaaattatgccaaataaaagtggttttctga

SEQ ID NO: 413 - DNA, 945 bp, Mus musculus
  MOR268-2
atgaggaggcaaaatcacaactctacagttgaattcatcctcttgggattttctaactatcctgaacttcaaggtcagatgtttggggctttcctagttatttatctggtgactgtgttgggaaatgccatcattatcaccatcatcttcctggaccagagtttgcacatccctatgtacctgtttctgcaaaatttatctttagtggacctctgtttcagtacagtcatcacacctgaaatactggtggtcctgactagtgagaaagcgaccatttcctttggtggctgttttgtgcagatgtacttcattcttctctttggtggaactgagtgttttctcctgggggcaatggcttatgatcgatttgctgcaatctgccatcctctatcttaccccgtgattatgaacaaaagtgtctttgtgaaattagttatgttctcatgggtctcaggtaccatgatgactactctgcagaccacatgggtgtttagcttcccctactgtgaccacaaggaaattaaccatctcttctgtgagactcctcctgtgctggagcttgcctgtgcagacaccttcctgtttgaagtctatgccttcacaggcaccattttgattgtcatggtccccttcctgttgatactcttgtcttatactcgaattctcttctccatcctgaggatgccatccactacagggaggcagaaggccttttccacgtgtgcctctcatctcacctctgtcaccctcttctatggcacagccagtataacttatctacagcccaaatccaggtactcaccagacaccaagaaactgatgtcactggcatacacacttctcacccctctgctgaatccacttatctacagcctgagaaacaaggagatgaaaagggctgtggtaaaattatggcaaagaaaagtgactttacacacaggttga

SEQ ID NO: 414 - DNA, 981 bp, Mus musculus
  MOR268-3
atgtccctaagacaaacacagggttccaatattgtaatgaggaggcaaaatcacagctctacagttgaattcatcctcttgagattttctaactatcctgaacttcaagatcagatgtttgggactttcctagttatctatctggtgactgtgatgggaaatgccatcattatcaccatcatcttcctggaccagagtctgcacatccccatgtacctatttctgcagaatttatctttagtagacctctgtttcagcacagttatcacacctaaaatgcttgtggtcctgactagtaagaaagcaaccatttcctttggaggttgttttgcacaaatgtatttcattcttttctttggtgtgactgagtgttttctcctgggagcaatggcttatgatcgatttgctgcaatctgccatcctctatcctaccccatgattatgaacaaaagagtgttcatgaaattagttatgttctcatgggtctcaggtaccatgatgagtactctacagaccacatgggtgtttagcttcccctactgtgaccacaaggaaattaaccatctcttctgtgagactcctcctgtgctagaactggcatgtgcagacactttcctgtttgaagtctatgccttcacgggcaccattttcattgtcatggtcccctttctgttgatactcttgtcttatactcgaattctcttcaccatcctgaggatgccatccactacagggaggcagaaggccttttccacgtgtgcttctcatctcacctctgtcaccctcttctatggcacagccagtataatttatctacagcccaaatccaggtactcaccggataccaagaaactgatgtcattggcgtatatactgctcacccctctgctgaatccacttatctacagtctgaggaacaaggagatgaaaagggctgtgttgaaattatggcaaagaaaagtggcttttcacacagcttga

SEQ ID NO: 415 - DNA, 930 bp, Mus musculus
  MOR195-1
atgggaagaggcaatcgcaccacagtaacagaatttgtcctcatgggattcacagatcgccctgagcttcagctccccctctttgtggtgttcctgattctcattaccctggtaggaaaccttggcatgatcttgctcatcaaggcagattccaggcttcacacgccaatgtactatttcctcagccacctggctttcattgatctctgttattcatcttccattgggccaaaaatgctgcaaaatttattggtgaagaaaaaaaccatctccttttcaggctgttttgctcagctgtacttctccagtgcttttgtcactactgaatgcttcctcttggccacaatggcctatgatcgttacatggccatctgtaatcccctaacctacacagccatcatgacacagcgggtctgcaaggaactggtgataggagtctacacctatggcttcctgaactctgtgatacagacagtactgactttccagctgtctttctgcaactccaatgtgatccaccacttctactgtgctgacccccctctccttgcactctcctgctctgacacccacaacaaagagaggcagcttctgatcttctcggcagtgaatctcactggatccctcatgactgtcctcatctcctatatctgcatcctagtgtccattataaaaattgagccttcccagggcaagtgtaaagcattctccacctgtgcctcccacctcactgtggtcaccatcttctatgggacgttatttttcatgtacatgcggcaaccaaaaactgggagttcgtggaagtatagcaaagtgatctctgtgttttatagtcttgtgattcccatgcttaaccctctcatctatagcctgagaaacacagaggtaaaggatactctgaaaaaaatgctggagggcaaaacttcatag

SEQ ID NO: 416 - DNA, 939 bp, Mus musculus
  MOR105-1
atgggcactggaaactggagccaagtaatagaattcatcattttgggtttccctcacttccaaggtgtccagatttacctgtttttcttgctgctttccatttacctcactaccatattgggaaacttgctgatattcttggtggtctacctggactctcggctccacacgcccatgtacagatttgtcagcatcctttccttcttggagctgggctacacagctgccaccattcccaagatgctagcgaacttgctgagtgagaagaagacgatttccttttctggatgtctcctacagatctacttctttcactctcttggagctactgagtgctacctcctgacagcaatggcatatgacaggtacttagccatttgcaggcctctccactatcccaccctaatgacccagtcactttgtatcaagattgccattggttgctggttgggaggcttggctgggccagtggtggaaatttccttggtgtctcgtctccctttttgtggccccaatcacattcagcacattttttgtgatttccctcctgtgctgagtttggcttgtactgacacatcagtcaatgtcctagtagattttattataaattcctgtaagatcctggccacctttctgctgatcctcagctcctacttgcagataatccgcacagttctcaagattccctctgctgcaggcaagaagaaggccttctccacgtgtgcctcccatctcactgtggttctcatcttctatgggagcatccttttcatgtatgtgcgactgaagaagagttactcccttgactacgaccgagccttggcagtagtctactctgtgattactccctttctcaaccccttcatttatagcttgcgcaacaaggaaatcaaggaggccctgaagaggcagcttatgagaacaggaatactgaggtga

SEQ ID NO: 417 - DNA, 948 bp, Mus musculus
  MOR105-2
atgagaattaacagaagcacttcagtgacagaattcctcttctctggatttccccagtttgaagatggaagtttcctcttcttcattcctttgttcttcatttacatattcattgttattggaaatctcattgtgttttttgcagtcaggatggatacccgtcttcacaaccccatgtacaatttcatcagcattttctcatttctggagatctggtataccactgcaactattcccaaaatgctcaccaatctcatcagtaagcaaaggaccatctctttgattggatgcctgctacagatgtacttcttccattcacttggaaattcagaaggtattttactgacaacaatggctattgacaggtatgttgccatctgtaatcctctccggtacccaactatcatgactccccggctctgtgctcagctctctgcaggctcctgcatctttggctttcttgtgttgcttccagagattgcttggatttccacactgcccttctgtggccccaaccaaattcatcagatcttctgtgactttgaacctgtgttgcgtttggcatgtacggacacctccatgattctggttgaagatgtggttcatgcagtggccatcatcttctctgtgttggttattgccatctcttacatgagaatcatcaccgtgatcctgaggatcccctctggtgaaggccgtcggaaggctttctctacttgtgctgcccatcttggtgtcttcttgatgttctatggcagtgtctccctcatgtatctgcgtttctcagctactttcccaccaattttagacacagctattgcactaatgtttgcggttcttgcaccctttttcaaccctatcatctatagtctgagaaataaggacatgaagatagcaattaagaagcttctctgctctcagaagatgctgcctacatctgcaagctaa

SEQ ID NO: 418 - DNA, 948 bp, Mus musculus
  MOR105-3
atggagaatggaaacctatctaccgtgactgtgtttgtcttcactgggttcccccagcttaagaatggtggcctcctgtacttttttcctctactgttcatttacatctttattgtgacaggaaacctgatgatcttttttgctgtaaggttggatactcgtcttcataatcccatgtacaatttcataagtatcttctcatttcttgagatgtggtatacaacagctaccatacctaagatgctctccaatctgatcagtgagcaaaagaccatttccttcattggctgcctcttgcagatgtacttcttccattcacttggaaataccgaagggacccttctgactgtcatggctattgacaggtatgttgccatctgtaatccactccgctacccaaacatcatgacacccaggctctgtgctcagctcactgctggttcttgtgtatttggcttcctcatccttctacctgagattgtgtggatttctactctacctttttgtggccccaatcaaatcactcagatattctgtgatttcacccctttgttgaagttagcctgtacagatgcctcagtgatcttggttcaagatgtgatacatgctcttgctattctgatcacaagtctgattatttctctttcttacataagaattattgttgtcatcctgagcatctcctcaacagaaggtcgcaaaaaagctttttccacttgtgctgcccacattgctgtcttcctcttgttttttggcagtgtggcccttatgtatcttcgattctctgccacctatacaccattctgggacaacaccattgctcttacattttctgtgtttgcccctcttttcaatcctattatatacagcctgagaaataaggacatgaaagatgcaattaacaaactcatttgttctcaaaaagtatccaatgaatcacgtaggtaa

SEQ ID NO: 419 - DNA, 957 bp, Mus musculus
  MOR105-4
atgacccaattggtggccagccagaatcaaactatggtgattgagttcctcttctccgtgttcccacctctgtatgaaggtggcctcttgtttttcattctattgattcttgtctatgcattcattatatcagggaacctagtgatctttgttgctgtccagctggacatggctctgcacacacccatgtatttcttcatcagtgtgttgtctttcctggagatctggtataccacgactaccattcccaagatgctttccagcctagtcagtgagaagaagaccatctccctaggtggctgcctcatgcagatgtactttttccactcgttgggtatcacagaaggctgtatcctgacagcaatgtccattgacaggtacatagctatctgctatcctctccgttaccctaccatcatgacttccaaactttgtattcaactaacagctggctcctgcttctgtggcttccttctggtactccctgagattgcatggattgcgactttgcctttctgtggctccaacaagatccatcagatcttctgtgatttcacccctgtgctcagtttggcctgtaccgatacatcgctggtggtcattgtagatgccatccatgcagtagagatcctggcctccttccttgtaattgccctgtcctatatccggatcatcatggtaattttggggatgccctcagcagaagggaggcacaaggctttctccacttgtgcagcccaccttgctgttttcttgctgttttttggcagcgtggctgtcatgtatttgagattctcagctacatattcagtcttctgggacacagtaattgcggtcactttcgttatccttgctccatttctcaaccccattatttatagtctaagaaacaaggaaatgaaagatgctattgggaggctttttcatcagaagagagatgttcgggctcagaaatag

SEQ ID NO: 420 - DNA, 900 bp, Mus musculus
  MOR105-5P
atgtggaacacatcagaagctgcctttttgtcttgctcctgttggtatacctgttcaccattggtggtaatatgctcatcttccctagtcatacgactggatgcagccctccacaaacccatgtaccactttgtcagtgttctctctttcttggagttatggtatacagccaccaccatgcctaagatgctagctaatcttctcagtgagaagaagacaatttcttttgcaggatgcctccttcagacctattttttccactcccttggggcctctgaatgctaccttcttacagccatggcctatgaccgatacctggccatctgccgacccctccactacccttcaattatgaccacagcactctgtgtaaagatggctgctggctgctggacttgtggttttctgtgtcctatttctgaggttatcctggtctctcagctccccttctgtaactacaatgagatccctcacattttctgtgattttccacctcttttgagcctggcctgcaaagacacatccactaatgttctggtggactttgctgtcaatgccttcattatccttatcactttcctttttatcatggcctcttatgggaggataattggtgctgtgctgaagatcaaaacagcagcaggaagaaggaaggccttctccacttgtgcctcacacctcattgtggtgctcatcttcttcgggagcatcatctttatgtatgttcggctaaagaagagctactcattgactcttgaccgcactctagccgtagtctactctgtgctaacacctttggccaatcccattatctatagtcttcgaaacaaggaactcattcaggccatcaagaggaccttcttcaagaaagtggagaaagctagtccaactcatcattaa

SEQ ID NO: 421 - DNA, 945 bp, Mus musculus
  MOR123-1
atggatcatgtcaactacacctggacacggaccttcatccttgctggtttcactacctctggtgccctccgacctcttgccttccttgggaccctgtgcatctatctcctcacactggcagggaacttgttcatcattgtcttggtccaggcagattcagggctgtccactcccatgtacttctttatcagtgtcctctccttcctggaactctggtatgtcagtaccacagtgcccaccttgctgcacaccctgctccatgggcattcacccatcccctcgtctgcatgcttcgtccagctgtatgtctttcactccttgggcatgaccgagtgctacctgttaggtgtcatggctctggaccgctaccttgctatctgtcgtccactgcactaccatgcactcatgagcaagcaggtacagctatggcttgcaggtgccacttgggtagctggcttttcagctgccctggtgcctgcatgtctcactgccagtttaccatattgcttgaaagaaatagcccattacttttgtgacctggcaccactaatgcggttggcatgtgtgagcacaaggtggcatgctcgggttcatggggcagtgattggtgtggccactggatgcaattttgtcctcatcttgggactctatgggggtattctgacagctgtcctgaagctgccttcagctgccagtcgagccaaagccttctccacatgctcctcccatatgacagtggttgcactgttctatgcttctgcttttactgtgtatgtgggttcacctcagagcagacctgagggcactgacaaacgtattgccttagtgtatgccctcctaactccattcctcaaccctatcatctattcccttcgcaacaaagaggtgaaggaagccgtgaagagggtcagtgaaaagatcagaactttgttgagagacacctaa

SEQ ID NO: 422 - DNA, 939 bp, Mus musculus
  MOR123-2
atggatcatgtcaactatacctggacacggaccttcatccttgctggtttcactacctctggcaccctgcaacatcttgcagtttttggaaccctgtgcatctatctcctcacactggcagggaacttgttcatcattgtcttggtccaggcagattcagggctgtccactcccatgtacttctttatcagtgtcctctccttcctggaactctggtatgtcagcaccacagtgcccaccttgctgcataccttgctccatgggccttcacccatcccctcgtctgcatgctttgtccagctgtatgtcttccactccttgggcatgaccgagtgctacctgttaggtgtcatggctctggaccgctaccttgctatctgtcgtccactgcactaccatgcactcatgagcaggcaggtacagaaacagttagttggggttacatggttggctggtttttcagctgccctggtgcctgcaggtctcactgcctctttaccttattgtttgaaagaggtggcccattacttttgtgacctggcaccagtgatgcagttggcatgtgtggacactagctggcatgctcggctttatattgcagtgattggcatgatcaatacatgcaatcttactttcatcttgggactctatggaggtattgtgagagctgtgctgaagctgccttcagctgctagtcgtgcaaaagccttttccacctgttcctcccatataaccgtagtgacactgttctttggctctgccttcattgtctatgtgggtccaccagagattcgagctgagggcagagacaagcttattgccttggtatatactttgctcacccctttcttcaaccctattatttatactcttcgcaataaggaagtaaaagaggcttttaagagggtcacacagaggattaatgctgtgctgaaatga

SEQ ID NO: 423 - DNA, 942 bp, Mus musculus
  MOR267-6
atggtagagagcaatgtgacctgctggcagggctttgtcttcttgggcttctctagcttcggggaacttcagcttctgctgtttgtcttgtttttgtctttgtaccttgtcaccatcaccagtaatgttttcatcatcatagtgatcagactggatagccatctgcacacacccatgtatctcttcctttccttcctatccttctctgagacctgctacacattgggaatcatcccaaggatgctctctggcctggttatggggggacaggccatctcctttatgggctgtgctacacagatgtttttctctgcatcctgggcttgtaccaactgcttcctcctgtctgtcatgggatttgatagatatgtggccatctgtgccccacttcattatgccagccgtatgaatcccactgtctgtgcccagctagttggcacctccttcctgagtggatacctttttggactgggaatgactctagtcatttttcgtctctcattctgcagctcccatgaaatccagcactttttctgtgatacacctccagtgctaagcctcacctgtggggacacaaggctgagtgaattgggaatcctcatccttagtctgctggtcctcttggtctcgttcttcttaattagtgtctcctatgcctatattttggtagcaatcctgagaatcccttctgccgagggacggagaaaagctttttctacttgtgcctcacacctcacagtggtcgtgattcactatggctgtgcctccttcatgtacttgagacccaaagccagctactctcttgagagggatcagcttattgctgtcacctacactgtggcaacccctctcctcaatcctattgtttatagtctaaggaatcgggctgtgcagacagctctgagaaatgctttccgggggagtttacttggtaaaagataa

SEQ ID NO: 424 - DNA, 930 bp, Mus musculus
  MOR267-7
atgatcaaccaaacaatcttacaggaattcattctcataggcttctcagcttacccacttgtacagacctgtctctttgtggtctttctttgcctgtatatggtcactcttgcaagcaacctgaccatcatgggtttgacttgggcagacagatatctccacactcctatgtactactttctcagtgcactctccttctctgagacctgctacaccctgactatcatccccaagatgctggtggatctactggacaaagacaaccgcatttcagacataggctgtggcttgcagatgtgtttcttcctgggccttggaggaacaaactgtatccttctcacagtgatggggtatgaccgatttctggccatctgcaatgccctcaaatatcctcttctaatgaccaatgttgcatgtggacaacatgtggccactgcttgggttggaggcttccttatttctctcattgagacaacactgatattcagggtgtctttctgcatacctaacctcatcagacacttcttctgccatatgagggcagttctgaggctgtcctgcacagacagtaacttcacagaattcattgtaacactgatgtcagtgtctggtttgctgggtacattcttgctcatcctcctgacttatgtgttcatcctttcttctgttctcaagatcccttcagccgagggtaaacaaaaggcatttcccccctgtgcctcacatctcactgtggcaatcatccactttgtttttgcacctgttgtttatctgaagccagaaaactccgggggagatgacacactcatagcagttccgtataccatcattaccccattcctcagtccaatcatattcacactcaggaataaggacataaagaatgcttttagagagatcatgagaaagacagtagtcttgaaaaaataa

SEQ ID NO: 425 - DNA, 948 bp, Mus musculus
  MOR258-3
atgcagacccttaggaaggacaactgcagctcagtgtctgagttcctcctcctgggcttctccagcgaatcccaggtcagagtggccctgtttatcttttttcttcttctctacatgatcaccctcctgggcaacgggctcatcatcaccctgatttacctagactctcgcctccacacacccatgtacttctttctcagtatcctctctttggtagacatgagttacgtcactaccactgtgccccagatgctggttaacatggtgtgtccaaggaggaccatctcctggggtgcttgtgtagcccagatgttcatcttcctgctgctgggtattgctgagtgtgttctctatgccatcatggcctacgacaggtatgtcgccatctgcttcccccttcactactctgtactcatgagccgtcttgtgtgtatcaagatggtcacagtctgctggtccatcagcatcactggtgctctgatctacactgtcttcaccatgcgtctgccctactgtggtccctacaagatcaaccacttcttctgtgaggtccccgctgtcctgaagttggcctgtgcagacacatccttcaatgaccgcttggacttcatcctgggtttcatcttccttttggtccctctctccctcatcctggcctcctatgcctgcatctttgcctccatcttaagaatccgctcatcccaggggaggctcaagtccttctccacgtgtgcatcccacatcactgtggtcaccatgttctatgggccagccatgatcatgtacatgaggcccggttcttggtatgacccagaacgggacaagaagctggctctgttctacaatgttgtctctgccttcctcaaccccatcatctacagcctccggaataaagatgtaaagggtgcttttctgaaagtactaggagacagaggggcagccaagtga

SEQ ID NO: 426 - DNA, 915 bp, Mus musculus
  MOR258-4P
atgcaggaactcagccagatcaccgtgacagaattcattttactgggcttcacccccgaccccaggaccaatcctctgctcttccctttctttttggtcttctacctgctgatcctcctgagcaacagccacctcctcgcgatcatccaccaggactcagaccttcacacgccacctacgtactttttcattggtgttctctccatggtgggcgtgtgctatgccaccaccactgtgtctcagacgctggcacatatcctcagcaggaagagagccatctcttttacaagatgtgtagcccacatatacatctttctcctctttggggtcactgaatcctggcttctctccatcatgtctgtggacaggtatatagctatctgccacccgctaaggtacaaggtcatcgtgagccaagggatgtgtctcctaatggtgggtatctgtgccacctatggtgtggtgggtggcctgtgctgtaccttctttgctatgcgactgccctattgtggtcctagtgaaattgatcactacttctgcgaggtccctgcagttctgaagttggcctgtgcagacacatccctcagtgacttcgtggacttcatcataggcttcaatgtcatcgtagtccctctctccctcattgccattgtctatgccaacatcttcactgtcatcatgaagattcgctcaacccagaggaggaccaaggaccaaggtgaagacctgcgcctcccacatcactgtggtcaccatgtttgccatctcatgcagcatcatgcacatgagtcctgtctctggctccttatcaaacagcggcaagaaaatggccttttctataacattgctacagccttccttaaccctgtcatctacagtctaaggaacaaggatgtgaaaaaacgctttctttag

SEQ ID NO: 427 - DNA, 942 bp, Mus musculus
  MOR125-1
atgagagaagaaaatgagtcttctaccatagatttcactctcctgggagttacaaggcagcgggagcaggaatatttcttcttcatcctcttcctgttcatttaccccatcacagtgtttgggaacatgctcatcatcctagccattcactctgacactcgcctccataaccctatgtactttttcctggccaacctctcccttgttgacatcttcttctcctctgtaactattcccaagatgctggccaaccatctcctaggtagcaaggccatctcctttgggggatgtatggcacagatgtacttcatgataggcttgggaaatacagacagttatatactagctgcaatggcatatgaccgagctgtggctatcagtcgcccacttcattatgcaacaattatgagtccacaactttgtgtcctgctggttgctgggtcctgggtgattgcaaatgctaatgcactgccccacaccctactcacagctagactgtccttctgtggcaataaggatgtggccaacttctactgtgacattacacctttgctccagctgtcctgttctgacatccgcttcaatgtgaagatgatgtaccttggggtgggggtcttctctgtgccactgctgtgcatcatcatctcctatgtccgggtcttttccacagtcttgcgggttccatctaccaagggcttcctgaaggccttgtccacctgtggctctcacctgacagtggtgtccttgtattatgggacagtcatgggcatgtatttccggcccctgaccagttacagtctgaagcatgcattgataactgtgatgtacacggcagtgaccccaatgctgaaccctttcatctacagcctgaggaaccgggacatgaaggctgctctgaagaaactcttccactgcccctcttcctcttcctccctcatgtga

SEQ ID NO: 428 - DNA, 945 bp, Mus musculus
  MOR157-1
atggctgtgaccaacctcacatacaaaccacagttccagctcctcggcttgatggatggcacagatccccacccgctgctgtttcttcttttccttagcatttacctactcaatgccctgggcaatctgagcatggtggtgctggtgaggtctgatggggctctgtgctcccccatgtattatttcctgggtcacctgagcctcgtggatgtctgctttaccacagtcactgtccccagactgctggccaccttgctccatcctggccaggccatatccttccaggcttgttttgcccagatgtacttctttgtagctctgggtatcaccgagagctaccttctggcagccatgtcttatgaccgtgcggtggctgtgtgtagaccgctgcactatggtgcagtcatgacaccctggcgctgctttttgttggtggctgcatcctgggctgtggcccatctgcactctcttctacatacactgctcatctctgctctcacctaccctccctctgccccagtgcgccacttcttttgtgacatgactgtaatgctgagcttggcaacctctgacacatcagctgcagagactgccatcttctcagaggggctaacagtggtgttgacccctctgctcctcgtgtccctttcctatgcacgcatccttgtggcagtgcttggaattcggaccacaggaggccggcaccgtgtcttctccacctgtggggcccacctggtggtagtgtcacttttctttggctcagtcctctccgtctacttccgtccatcatctgcctactcagctcgttatgaccgcatggccagtgtggtctatgcggtagtcacaccgaccttgaacccttttatctacagtcttcgtaacaaagaggtcaagagtgccctaaaaaggggtttcagatggagagcagcaccccaagatgagtaa

SEQ ID NO: 429 - DNA, 936 bp, Mus musculus
  MOR255-3
atggagtccaagtttgagagcaatggaacagcagttacagagttcattcttctgggcttggtagagacagcagggctgcagccagtcatctttgtagtcttcctcttcgcctacttgctcacagttgggggcaacctaagcatcctggcagctgtatttgtggaacccaaactccacacccccatgtacttctttctggggaatctgtccatgttggatgtcggctgcatcagtgtcactgtcccatcaatgttgggtcgtctcttgtcccacaagcgcacagttccctatggagcctgcctcacacagctcttcttctttcatcagctggctggagttgactgcttcctattgacagccatggcttatgaccgattcctggccatctgccggcccctcacttacagcacccgaatgaaccacaccgtccagaggatcttggtggccacgtcctgggcttgtgccttcagcaatgcactgacccacactgtggccatatccacacttaacttctgcggccccaatgtgatcaatcacttctattgtgacctgcctcagctcttccagctgtcctgctccagtacccagctcaatgagctgctgctctttggtctgggtgtcctcatggctggtgcacctgtgattctcattgtcacctcttacatccatgtggcagctgcagttttgagaatccaatcttcagagggcaggaagaaagccttctccacctgcagctctcacctcactgtggtcggcatcttctatgggacaggggtcttcagctacatgcggctggggtcagtggaggcttcagacaaggacaagggcattggcatcctcaacactgtcatcagtcccatgctgaacccacttatctacagccttaggaaccctgatgtgcagggtgccctgaggagggtactcacaggaaagtga

SEQ ID NO: 430 - DNA, 948 bp, Mus musculus
  MOR255-4
atgcagacaaagcctagaatcaatggaaccactattactgaattcattcttctgggtttggtggagacaccagagctgtggccacttgtcttcatactcttcctcttggcttacatgacaacagttggaggtaacctgagcatcctggcagctgtcttggtggaacccaaactgcacactcccatgtacttcttcctggggaatctgtcagtgatggatgtggggtgcatcagtgtcactattccctccatgttggttcggctcttggtccaaaagcatacaattccatatggagactgcctcacacagctcttcttcttccatctgctggctggggttgactgtttcctgttgacagccatggcttatgaccgcttcctggccatctgccagcccctcacttacagcacccgaatgaactacactatacagaggatcttggtggctatgtcctgggcttgtgcctttagcaatgcactgacacacacagtagccatatccacacttcacttctgtggcccaaatgtaatcaatcacttctactgtgacctgcctcagctcttccagctgtcctgctccagtacccagctcaatgagctgctgctctttggagtgggtttcataatggcaggaacccctatggcactcatttttatctcttatatccatgtggcagctgcagttctgcgaattcgctctgctgaaggcagaaagaaagctttctccacatgcagctctcacctcactgtggttgccatgttctatggcacaggcatgtttaactacatgagactgggttccaccaaattttcagataaggacaaagctattgggattttcaacactgtcatcaaccctatgctgaacccactcatctacagtctcaggaaccctgatgtgcaggctgccctctggagggtactcacagggagacggccagcagcttga

SEQ ID NO: 431 - DNA, 948 bp, Mus musculus
  MOR255-5
atgcagccaaagcctagagccaatggaaccactattactgaattcattctgctgggtttggtggagacaccagagctgtggccacttgtcttcatactcttcctcttggcttacatgacaacagttggaggtaacctgagcatcctggctgctgtcttggtggaacccaaactgcacacccccatgtacttcttcctggggaatctgtcagtgatggatgtggggtgtatcagtgtcactattccctccatgttggttcggctcttagtccataagcgtacaattccatatggagactgcctcacacagctcttcttcttccatctgctagttggggttgactgcttcctattgacagccatggcttatgatcgcttcctggccatctgccggcccctcacttacagcacccgaatgaaccacactatccagaggatcttggtggctacgtcctgggcttgtgccttcagcaatgcactgactcacactgtagccatatccacacttcacttctgtggccccaatgtgatcaatcacttctactgtgacttgcctcagctcttccagctgtcctgctccagtacccagctcaatgagctgttgctctttggagtgggtttcatcatggcaggaacccccatggcactcattttcacctcttatatgcatgtggcagctgcagttctgcgaatccgctctgctgaaggcagaaagaaagctttctccacatgcagctctcacctcactgtggttgccatattctatggtgctggcatctttaactacatgagacttggttccaccaaactttcagataaggataaagctattggtattttcaacactgtcatcaaccctatgctgaacccactcatctacagtctcaggaaccctgatgtgcaggctgccctctggagggtactcacagggagacggccagcagcttga

SEQ ID NO: 432 - DNA, 948 bp, Mus musculus
  MOR255-6
atgcagccaaagccaagagccaacggaaccactgttactgaattcattctgctaggtttggtggaaacaccagagctgtggccacttgtcttcatactcttcctcttggcttacatgaccacagttggaggcaacctgagcatcctggcagctgtcttggtggaacccaaactgcacacccacatgtacttcttcctggggaatctgtcagtgatggatgtggggtgcatcagtgtcactattccctctatgttgggtcggctcttggcccacaggcttacagttccatatggagcttgtctcacacagctcttcttcttccatctgctggctggggttgactgcttcttgttgacagccatggcttacgaccgcttcctagccatctgccagcccctcacctatagcacccgaatgaaccattcagtgcagagaattttggtggcctcatcctgggcttgttccttcagcaatgcactaacccacactgtggcgacatccacacttcgcttctgtggtcccaatgtgattgacaacttctactgcgaccttcctcagctcttccagctctcctgctccagtacccagatcaatgagctgctactctttgcactgagtttcataatggcaggaacccccatggcactcatttttacctcttatatcaatgtggcagctgcagttctgcgaatccgctctgctgaaggcaggaagaaagctttctccacatgcagctctcacctcactgtggttgccatgttctatggtacaggcatgtttaactacatgagactgggttccaccaaactttcagataaggataaagctattggtattttcaacactgtcatcaaccctatgctaaacccactcatctacagtcttaggaaccctgatgtgcaggctgccctctggagggtactcacaggcagacgaccagcagcttga

SEQ ID NO: 433 - DNA, 933 bp, Mus musculus
  MOR202-1
atggaaaattgtaccaaagtgagagagttcattctcttgggactaactgatgacccaggcttgcaggtttccctttgtatcatgttcaccctcatttacctcattgatgtggttggaaacacggggctgataatgttggttcttatggactctcatttgcatacacctatgtactttttcctttgcaacttgtcttttgtagatttgggttactcctcagctgtcactcccatggtcatttctgagttcttcatagtctccaaggtggtctcctacaatgcctgcgctgcacagatgttcttctttgtaggctttgccactggggaaaattacctcttagcatcaatggcctatgatcgctatgtagcagtatgtaaacccctgcattactctaccaggatgacaacaagtgtttgtatttgtttgaacattgtctcttatatctgtggtttcttgaatgccatttttcatgttggggacatattcagcctctctttttgtaaatctaatgtggtccatcactttttctgtgatgttccagcagtcttggctctatcttgctctgatatacacctcagtgaagtgattcttgtttttttgtcaaccttcaatgtcttctttgctcttctgatcatctcagtttcctatctctttatatttataactgtcttgaagatgaagtcagaccagggacaccaaaaagctttgtccacctgtgcctcccacctcactgtagtctccatattttatagcactgtcattttcatgtacttacaacccagctccagccattctatggatgcagataaagtagcatctatgttctacactatgatcatccccacactaaaccctttggtttatagcctgaggaacaaggaagtcaacaatgcattcaagaaagtggttgagagggcaaaaatttttatgtaa

SEQ ID NO: 434 - DNA, 927 bp, Mus musculus
  MOR202-2
atgacaataatgaagaacaggacagaagtgacagagttcattctgctggggctcaccaatgacccaggcatgcagcttcccctgtttatcaccttccttctcatctacaccatcaccgtggtgggaaacctagggatgatcctgctgattgtcctggactctcggctccacacccccatgtacattttccttggtaatctgtccttggttgatttttgttactcctcagctgtcacacccacagtgatgactgagcttctaataggaaaaaaggtcatttcctacaatgactgtgctgctcagatgttcttttttggagcctttgctactgtggagaattatctgttggcctcaatggcctatgatcgctatgcagcagtgtgtaagcccctacactatgccaccatcatgactaaaagtgtgtatacaaggattatcactgcctcttatgggatcagtttcatgagtgcctccatccatattgcagacatatttactctctccttctgcaagtccaatgtgatccatcattttttctgtgatgttcctgcaataatggctctcacttgttttgataatcaagttagggaacttgttcttctttacattgagagcttagatgtgttttttgctctaatagttatctgtacatcttacatgttaatttttgtcaccatcttaaagatgcactcggcttcaggacatcacaaggctatatccacctgtgcctctcacttcactgcagtgtccattttctatggaactgtcattttcatgtacttacagcctagctccaatcattccatggacatagacaaagttacatctgtattctacacaatggtcattcctatgctgaatcctctagtctacagcatgaggaacaaggaggtaaagaatgcatttataaagttgatactacattag

SEQ ID NO: 435 - DNA, 930 bp, Mus musculus
  MOR202-3
atgacaataatgaagaacaggacagaagtgacagagttcattctgctggggctcaccaatgacccaggcctgcagcttcccctgtttatcaccttccttctcatctacaccatcaccgtggtgggaaacctagggatgatcctgctgattgtcctggactctcggctccacacccccatgtacattttccttggtaatctttctctggtggatttctgttactctacagctgtcacacccacagtcatgaatgggctactaataggaaacaaggtcatttcctacaatgattgtgctgctcagatgttcttttttggagcctttgctactgtggagaactatctgttggcctcaatggcctatgatcgctatgcagcagtgtgtaagcccctacactatgccaccatcatgactaaaagtatgtatacatggcttatcactggctcttatgtcatcagttttacaaattcctccatccatattgcagacatattcactctctccttctgcaagtccaatgtgatccatcattttttctgtgatgttcctgcaatcatggctctcacttgttttgataatcaagttagggaacatgttcttctttacattgagagtttaaatgtgttttttgctctaatagttatttgtacatcttacatgttaatttttgtcaccatcttaaagatgcactcagcttcaggacatcacaaggctatatccacctgtgcctctcacttcactgcagtgtccattttctatggaactgtcattttcatgtatttacagcccagctccaatcattccatggacacagacaaagtaacatctgtattctacaccatggtcattcctatgctgaatcctctagtctacagcctgaggaacaaggaggtgaagaatgcatttataaaattgatactacattattaa

SEQ ID NO: 436 - DNA, 960 bp, Mus musculus
  MOR202-4
atgacttcaatggagaacatcacagaagtgacagaattcatcctgctggggttgacagatgaccccaatcttcaggttcctctcctcctgatatttttattcatctaccttgtcactctgattggaaatggagggatgatggtcatcatcttctcggattcccacctccacactcccatgtactttttcctcagtaacctgtcctttgtagatctgggatactcatcagctgtagctcccaagatggtggctgcacttcagtcagggaacaaggtcatctcctataatgggtgtgcagctcaatttttcttcttcgtggggtttgccactgttgagtgctatcttttggcctccatggcttacgaccgccatgcagcagtgtgtaggcctcttcattacaccaccaccatgacaactggtgtgtgtaccatcctaaccattggctcttacacctgtggcttccttaatgcctcaatccatgctgcagatacctttaaactctctttctgtggttctaataagataaatcattttttctgtgacatacccccactcctggcccttgcatgctccagcacacacatcagtaaattggttgtcttttttgttgtgggattcaatgtctttttcactctcttggtaattatcatctcatacttcttcatttacattgctattcaaaacatgaagtcttctgagggacgaaagaaggctttctccacttgtgcttcccacctcactgctgtgtccatcttctatggcacaattatcttcatgtacttgcagcccagttctggtcagtccatggacacagacaaaatagcatctgtattctacactgtagtgattcccatgttgaaccccttgatctacagcctcaggaacagagaagtgaagagtgctctatggaaaatactcaacagattttaccctgcgtcttttagtgtgagtaggaagtag

SEQ ID NO: 437 - DNA, 945 bp, Mus musculus
  MOR202-5
atggagaatagtacagaggtgactgagttcattctcgcaggattaacagatgacccaaagctccagataccactcttcattgtcttccttctcatctatctcagcactgtgcttgggaacctgggaatggtagggttgatcctgctggactcacatctccacactcccatgtaccttttcctcagtcatctatctctggtggactttggttattcttcagctgtcactcccaaagtaatgtcaggtctcctttcaatagacaaaaccatatcccataacacttgtggcacccaattcttcttcttcgtgggctttataaccacagaaagctttctcttggctgccatggcttatgaccgctatgcagcagtatgtaagccactgcattacaccaccaccatgactacaaatacttgtgcttgtctgaccataggttcctatgtctgtggcttcctgaattcctctatccacactgggaacattttcaggctttccttctgcaagttcaatgtgatagaccactttttctgtgatgcaccacctctcctggccctatcgtgctcagacacctatatcagtgagactgtgattttctttgttgtgggttttaatgctcttttctctattgtagtcattacgatctcctatctgcttattttcatcactattctgaggatgcgttcatctgaaggacgccacaaggccttttctacctgtgcttcccacctcactgcagtctccatcttctatgggactgtcatcttcatgtacttacagcccagttccagtcacaccatgggcactgacaagatggcatctgtgttctataccatggtcattcccatgctgaaccctttggtctatagcctgaggaacaaagaggttaaaggtgcatttaaaaaagctgtaggaaatgcaaaatctgccttaacattcttattttag

SEQ ID NO: 438 - DNA, 924 bp, Mus musculus
  MOR202-6
atggagaacagaacagaagtgagatgcttcatcctggtgggactcaccaatgacccaagcctgcagcttccactctctatcacgttcctcctcatctatatcatcacccttataggaaatcttgggctgatcttgatgattctcttggattctcggctccacactcccatgtacattttcctaggtaacctgtctttagtggacttttgttattcttcaacagtaactccaaaggtcatagctggattccttacaggagacaagatcatgtcttacaatgcttgtgcctctcagatgttcttttttgcaaactttggagatgtggaaaactaccttttagcctcaatggcctatgatcgttatgtagcagtgtgtaagcccctacattatgctaccaccatgacaacacacatgtgtgcatctttagtcattggctgttatatctgtggtttcctcagtgcttccatctatactatggatgcattaagtctctccttctgtgaatctaatgtgatccatcatttcttctgtgatgtccttgcagtaatgattgtatcttgttctgatagccatgttaatgaactgattcttatttatgtagtcagcttcaatatgttttttgcccttataatcatcttaatatcctacatgttcattttcaccaacatactgaagatccactcatctgcaggatatcacaaagctgtttccacatgtgcctcgcacttcacagcagtctctattttctatgggactatcatattcatgtacttgcagcctagctccagtcacaccatggacactgacaaaattgcatctgtgttctacaccatggtcatctgcatgttgaaccctctggtttacagcctgaggagcaaggatgtgaaaagcgcattcacaaaaattgtattgaggtcaaaatga

SEQ ID NO: 439 - DNA, 945 bp, Mus musculus
  MOR202-7
atggagaatagtacagaggtgactgagttcattctcacagggttaacagataacccagagctccagataccactcttcattgtcttccttctcatctatctcagcactgtgcttgggaacctgggaatggtagggttgatcctgctggactcacatctccacactcccatgtaccttttcctcagtcatctatctctggtggactttggttattcttcagctgtcactcccaaagtaatgccaggtctcctttcaatagacaaaaccataacacacaatgcttgtggcacccaattcttcttctttgtaagctttataactacagaaagcttcctcttggctgccatggcttatgaccgctatgcagcagtatgtaagccactgcagtacaccaccaccatgactacaaacacttgtgcttgtctgaccataggttcctatgtctgtggcgtcctgaattcctctatccacactgggaacattttcaggctttctttctgcaagttcaatgtgatagaccactttttctgtgatgcaccacctctcctggccctatcatgttcagacacttctgtcagtgagatggtgattttatttgtggtgggtttcaatgatatcttctctattgtggtcatcccgatatcctatctgtttatattcatcactattctgaggatgcgttcatctgaaggacgccagaaggccttttccacatgtgcttcccacctcacagtagtcttcatcttttatggatcaggcatcttcatgtacttgcagcctagttccagtcacaccatgggcactgacaagatggcatctgtgttctataccatgatcatccccatgctgaaccctttggtctacagcctgagaaacaaagaggtcaagagtgcattcaaaaaggctgtggagaaagccaaaatttctctagcattcacattttaa

SEQ ID NO: 440 - DNA, 939 bp, Mus musculus
  MOR202-8
atggagaacaggacagaggtgacagagttcattcttctaggtgtgaccaatgccccagcactgcagaccccactctttatcctgttcactcttatctacttcatcaacatgactggaaacttggggatgcttgtgctgattctctgggactctcgactccacactcccatgtacatttttcttggtaatttatccctggtagacatcttttattcctctgctgttaccccaacagttgttgctggacttcttgtaggaaaccaagccatttcctacaatgcttgtgctgcccagatgttcttgtttgtagtctttgctacggcagaaaattttctcttggctgcaatggcctatgaccgctatgcagcagtgtgcaaacccctgcattataccaccactatgactccaactacatgtgcatgtctgaccatggcctgctatgctggtggtttcctgaattcctctatccatactggggacacattcagactctacttctgcaagtccaatgtggtccatcactttttctgtgatgttccagccgtcatggttctctcttgctctgatagacacatcagtgagatggtcctcctatatggagcaagttttgtcatctgttctgcactccttgttattttgatatcttacatattcatttttatcaccatcttcaagatgcgctcagctgcaggataccagaaggctatgtctacctgtgtttctcacttcactgctgtctctattttctatggcactcttattttcatgtacttgcagcccagctccagccactccatggacactgacaaaatcgtgtctgtgttctacaccatggtcattcccatgctgaaccctgtggtctatagcttaagaaacaaggaggtgaaaagtgcattcaagaaagttgtggaaaaagcaaaatataccttaggattttga

SEQ ID NO: 441 - DNA, 939 bp, Mus musculus
  MOR202-9
atggagaacagaacagagatgacagggttcatcctcctaggactgacgaacgcaccagaactgagggcccctctgtttatcataatcagctttatctatttcaccaatgtgattggaaacttgggaatgattgtgctgattctctgggactctcgactccacactcccatgtactgttttcttgctaacctgtctctggtggacatcttttactcctcagctgtagctccaacaattttggctggacttcttgtaggaaacatagttgtctcctacaatgcctgtgttgctcagatgatctcattctcagcctttgtcactacagaagatttacttttggctgcaatggcctatgatcgctatgcagcagtgtgcaaacccctgcattataccaccatcatgactccaactgtgtgtatatgtctgataatggcctgctatgctggtggtttcctgaattcctccatccacactggggacacattcaggctttcattttgtggatccaatgcagttcatcactttttctgtgatgttccagcagtcatgactctctcctgttctgatagacatgttagtgagatagtactcatttatggagcaggcttcattatctgttctgcactccttgttattttgatatcttatacattcatttttatcaccatcttcaggatgcgctcagctgcaggataccagaaggctatgtctacctgtgtttctcacttcactgctgtctccattttctacgggactgttattttcatgtacttacaacccacctccagccactccatggacactgataaaaccgtgtctgtgttctacaccatggtcatccccatgcttaaccctatggtttacagtctaaggaacaaggaggtgaaaagtgcattcaagaaagttgtggagaaagcaaagtattccttaggattttaa

SEQ ID NO: 442 - DNA, 948 bp, Mus musculus
  MOR202-10
atgatgcagaatatttcagaactatcagaatttattcttgttgggttaacagatgcaccattcctgcaaactcctttatttatcatctttactctcatttacttgacaacattgtttgggaatcttgggatgataatgctgattctgctggactccagactccacactcccatgtactttttcctcagtaacctctctctggtggactgtgtttatgcctcagctgtcacccccaaggtgatggaaggttttctcacaggaaataagatcatatcctacaatgcatgtgctgcccagatgttcttctttgtagcctttgctattactgagaattttatcctggcctcaatggcctatgaccgtcatgcagcagtgtgcaaacctttgcattactccactactatgacaactacgatatgtgtcttgcttcttgttggatcttacttgagtggactcttacactcttccatccatgtttccttcacattccatctttccttctgtcgttctaatgtagtcaatcacttcttctgtgatatccccccactattagctgtttcttgctccagtattcgcacaaatgaaattatactcttcatgttggcaggatttgatgtggctttttcactattggttatattgacctcttacttactaatttctgttgcaattgtgagaatgcgctctgctgagagcaggaagaaggccatttccacctgtgcatcccaccttaccactgtttccatcttctatggaacaattatcttcatgtacttacagcccagctccaatcactccatggacactgacaagttggcatctgttttctacaccatggtcattcccatgctgaaccctcttgtatatagcctgagaaataaagaagtcaagaatgcattcaagaaggttgctggaaaagcagtgctttcactgggattaatcaattaa

SEQ ID NO: 443 - DNA, 930 bp, Mus musculus
  MOR202-11
atgagtctgatggagaataatacagatgttacacagtttctcctgctgggactcactgatgacccaggcctacagtttccccttttcattacatttctcctcatctataccatcaccctggtgggaaatctggggatgattctgctgattgtcctggactctcgtcttcatactcctatgtacttttttctaggtaatctgtccttggttgatttttgttactcctcagctgtcacacccacagtcatgactgggctaataggagagaagatcatttcctacaatgactgtgctgctcagatgttcttttttgtagcctttgctactgtggaaaattacctgttggcctcaatggcctatgatcgttatgcagcagtgtgcaagcccttgcactatgccaccaccatgactgcaaatgtgtgcatctgtctttgtataggttcctatacctgtggttttttgaatgcctccatccacattggggacactttcagtctttccttctgtaggtctaatgtagtgcatcacttcttctgtgatattccagcagtcatggttctctcttgctctgacagacatgttagtgagctggttcttgtttatgtagtaagcttcaatatcttttttgctctctcagttatctggatatcctatatattcatttttattacaatctgtaaaatgcactcaagttctggatatcgaaaggctatatccacttgtgcctcacacttcattgcggtatcaattttttatgggacgatcatattcatgtacttgcagcccagctccagtcattccatggacactgacaaaattgcctctgtgttctataccatgatcatccccatgctgaatcctctggtctatagcatgcggaacaaagaagtcaagagtgcattcacaaaagttttgcaggtggcaaaatag

SEQ ID NO: 444 - DNA, 933 bp, Mus musculus
  MOR202-12
atgacatcattgaacaacttgacagaagtgacacactttctcctgctgggactcactgatgatccaggcctgcaacttccccttttcatcatttttcttctcatctacatcattaccctggtagggaacctggggatgatcctgttgattctcttggactctcggctccatatccccatgtactttttccttgctaacttgtccctggtggatgttatttactcttcagcggtcacaccaaaagtcatggctggtctcataataggagataatctcatttcttacaatgagtgtgcagctcagatgttcttttttgcagcctttgctactgttgaaaattatctgttgacttcaatggcctgtgatcgctatgcagcagtgtgtaaacccctatactatgctaccaccatgactccaagtgtatgtatgtgtttcatcatgggctgctatgctcttgggttcttaaatgcctcagtttatcttggaaatacattcagtctttctttctgtaaatctaatgtggttcatcattttttctgtgatatgccagcaatcatggctctctcttgctctgatagacatgttaatgaactggtacttatttatcaagccagttttattatcttctttgctctcataataatattaatatcatatattataatttttatcacaatcttaaagatgcactcagaagcaggagttcagaaggctctttccacttgtgcttcccactttactgctgtttttattttctatggaacaacaatcttcatgtatttgcagccaagctctagacatgcaatggacacggacaaaattgtgtctgtcttctacaccatggtcattcccatgctgaaccctttagtttacagcctgagaaataaagaagtaaagagtgcattcatgaaagtagttttgaaagaaaaataa

SEQ ID NO: 445 - DNA, 924 bp, Mus musculus
  MOR202-13
atggagaacacgacagaagtgacatggtttgtcttgctgggactcaccaatgacccacaactccagcttccactcttcattaccttcctcctcatctacatcatcactctggtggggaacctagggattatcctgttgattctcttggactctaggctccacacccccatgtacattttcttgagtaacctgtccttagtggacttctgttattcctcaacaatcactccaaaggtcatggctggatttcttacaggagataggatcatatcttataatgcttgtgcctctcagatgttcttttttgcacactttgctgatgtggagagctaccttttagtgtccatggcctatgatcattatgtagcagtgtgtaagcccctacattatgccaccaccatgacaacacacttatgtgtttttctagttattggctgttacatttgtggtttcctgaatgcttccatctatacagtggatgtatttagtctctccttctgtgagtccaatgtcattcatcattttttctgtgatgttctagcagtcatgataatatctcgctctgacaaatatattaatgaactggttcttatttctgtagccagtttcaatattattttttctcttatactcatcttaatatcctatatgttcatttttaccaacatactaaagataaactcatctgaaggatatcgcaaagctctctccacttgtacctcacactttacagctgtcttcatttactatgggactgtcatcttcatgtacttgcagccaacctccagtcactccatggacactgacaaaattgtgtctgtgttctactccattgtcatccctatgttgaaccctctggtctacagcatgaggaataaggaggtgaagaatgcattcacaaaggttgtattgaggtcaaggtaa

SEQ ID NO: 446 - DNA, 924 bp, Mus musculus
  MOR202-14
atggagaacagaacagaagtgagatgcttcatcctggtgggactcaccaatgacccaggcctgcagcttccactcttcatcaccttcctcctcatctatatcatcacccttataggaaatcttgggctgatcctgttgattctcttggattctcggctccacacccccatgtacattttcctaggtaacctgtccttggtggacttctgttactcttcaacagtcactccaaaagtcatagctggatttcttatgggagacaagatcatgtcttacaacgcttgtgcctctcagatgttcttttttgcaaactttgctgatgtggaaaactaccttttggtctcaatggcctatgatcgttatgtagcagtatgtaagcccctacattatgctaccaccatgacaacacacatgtgtgtgtgtctactcattggctgttatatctgtggattcctcaatgcttccatttatactgtagatgcattaagtctctccttctgtgagtccaatgtagtccatcattttttctgtgatgttcttgcagtcatgattatatcttgctctgatagacatgtgaatgaactgatttttgtttatgtagccagcttcaatatcttttttgcccttatactcatcataatatcctacacattcatttttactaacatactaaagttgcagtcagctgcaggatatcgcaaagctttctttacttgtgcttcacacttcacagctgtctctattttctatgggactatcatattcatgtacttgcagcccagctccagtcactccatggacactgataaaatcgcatctgtgttctacaccatggtcatcccgatgttgaaccctctggtttacagcttgaggaacaaggatgtaaaaagtgcattcacaaagattatattgaggtcaggatga

SEQ ID NO: 447 - DNA, 927 bp, Mus musculus
  MOR202-15
atgatggagaaccagacagaagtgacagagtttatcctgctgggactcaccgatgacccagaacttcaaattccactcttcatcacatttcttgctatttatacaatcaccgtggtggggaatctggggatgatcctgttgattctcatggactctcggctccacactcccatgtacttttttctaggtaacttatctctggtagacttttgttactcttcagcagtcactccaaaagtcatgtctggttttcttataggagacaaagtcatttcctacaatgactgtgctgctcagatgttcatttttgcagcatttattactgtggagaattacctgttggcctcaatggcctatgatcgctatgcagcagtgtgtaaaccactacattataccaccaccatgactacaagtgtgtgtacgtggctgatcattggctcttatgtcattggtttcatgaatgcctccatccacataggagatacatttcacctttatttctgtgaatctaatgttgtccatcactttttctgtgatattccagcagtcatggttctctcttgttctgacagatatgccagtgagctggttcttgtatacatagtgagcttccacatattttttgcctttatagttatttggatatcctatgtgttcatttttgtcaccatcgtgaagatgcaatcagctgcaggacatcacaaggctatatccacctgtgcctcccacttcactgcagtctccattttctatggaactagtatttttatgtatgtacagccaagttccaatcactctatggacacagataaaattgcctcggtgttctacaccatggtcatccccatgctgaaccctctggtctacagcttgaggaataaggaagtgaagagtgcactcaaaaagatcattttacagacaacatga

SEQ ID NO: 448 - DNA, 945 bp, Mus musculus
  MOR202-16
atggagaatatttcagaggttactgaatttattctcgtggggataacagatgctccagagcttcagatccctttatttattatcttcactctcatttatttgatcgcactgtttggaaatcttgggatgatcatgttgattctgctggactcccgactccacactccaatgtactttttcctctgtaacctctccctggtggactgtgtttatgcctcagctgtcactcccaaggtgatggaagggtttctcacaggaaataagataatatcctacaatgcatgtgctgcccagatgttcttctttgtagcctttattgctattgaaagtttgatccttgcctcaatggcctatgaccgtcatgcagcagtgtgcaatcccctgcactacactaccatcatgacaagtaccacctgtattctaattgtcacttgctgctacatgtgtgggatcttacaatcctctattcatgttgctcttgcattttgtctttccttctgtaattccaacgtgattaatcactttttctgtgacattcccccactgctggacatctcttgttctgatacctacacaaatgagattacagtccttatcttgggtacttgtgatggtattttaactctcttggttatcttaaacacttacttgcttattttcattgctatcctgagaatgcgttcagttgaagcacagaggaaggcattctctacctgtgcatctcatctcatcactgtatccatcttctttgggtcaactttgttcatgtatttacagcccagttctaatcattctatgaacacagacaaaattgcatctgtgttttacactatggtgattcctatgctgaaccctgtagtatacagtttaaggaacaaggaggtaaaaaatgcatttaagaaggttgttggaaaattaatgacttcacttcagttagtcaattaa

SEQ ID NO: 449 - DNA, 924 bp, Mus musculus
  MOR202-17
atggagaacagaacagaagtgacatggttcatcctggttggactcaccaatgactcacaactgcagcttcccctcttcatcaccttcctcctcatctatactgttacctttgtaggaaacctgggactgatcctattgattctcttagactctcggctccacacgcccatgtacattttcttaagtaacctgtccttagtggacttctgttactcttcaacaatcactccaaaggtcatagctggaatcctcacaggagacaagatcatgtcctacaatgcttgtgcctctcagatgttcttttttgcaaactttgccaatgtggaaaactaccttttagtctccatggcctatgatcgctatgcagcagtgtgtaagcccctacattatgccaccaccatgacaaaacgtgtgtgtgcatctttagtcattggctgttatatctgtggtttgctgaatgcttccatctatactatggatgcattaagtctctccttctgtgagtctaatgtggttcatcattttttctgtgatgttttggcaatcatgactacctcttgctctgatagacatgttaacgaactgattcttgtttatttagccagcttcaatgtattttttgcccttatactcatcttaatatcctacatgttcatttttaccaacatactaaagatgcattcagcttcaggatattgtaaagctatctccacatgtgcctcacacttaacagctgtcttcattttctatgggacgatcatattcatgtacttacagcccagctcccatcactccatggacactgacaaaattgcatctgtgttctacaccatgatcatccctatgctgaaccctctggtctatagcctgaggaacaaggatgtgaaaagtgcattcacaaagattgtattgaggtcaggatga

SEQ ID NO: 450 - DNA, 939 bp, Mus musculus
  MOR214-1
atgattgccaggggaaacagcacagagatcacccagttcatcctcttgggattcacagatttacccataataataatactgctctttgtcacatttctgctcatctacattacaactctcacctggaatctgtccctcattgtgttaataagaatggattcacacctccacactcccatgtatttcttcctgtgtaacctttccatcatagatctttgctatgttaccagtacagtcccaaaaatgctctcaaactttttccaggaaaggcaaactaacagttttgtgggctgcattgttcagaatttcatcttttccaccatggggttgagtgagtcttgtctcatggcagccatggcctatgaccggtatgctgctatttgtaaccctcttctgtatgcatcgattatgtcacccactctttgtgtactgatggtgctggcatcctatctctctgggctcactgcttctttactacagttgtttgctttgcttcgtctccatttttgtggaactaatgtcatcaagcacttcttttgtgacatgccacagttgttagttctgtcctgcacagacactttctttgtacaagtcctaactgccatattaacaatgatctttggatttgtaaacatgctagttatcatgatatcttatgtctatattgtcttgtccattctgaagatcacttcagctaagggcagatccaaggcattcaacacctgtgcttctcacttgacagctgtttccctattctatacctccagtatctttgtctatttgagttcaagttctggtggctcctccagttttgacagatttgtgtctgttttctacactgtggtgattcccatgctgaacccattgatatacagtctgaagaacagagaaatcaaagatgctatgaagaggttgcagaaaaagacaatctgcaactag

SEQ ID NO: 451 - DNA, 948 bp, Mus musculus
  MOR214-2
atggaggcaatgattaaaggaaaaaacattactgagatcaccgaattcatcctcctaggattctctgatttcccccaaatcacagcactgctttttgttatattccttacactgtatattacagcactgacctggaacttgtcccttgttgttttaataaggatggactcctatctccatacacctatgtacttcttccttagtaatctgtcctttatagacatctgctatatctcttctacagtcccaaagatgcttttcaacttcttccaaaaaaggcaaactatcagctttgtgggctgcatagttcaatactttatgttttccacaatgggactgagtgaatcttgcctcatgacagccatggcctatgacaggtatgctgccatttgtaaccctcttctgtactcatcagtcatgtcacccacactatgtgctcggatggtgatgggaagctacacagctggatttataggttctgtatctcaggtgtttgccatgctgcagctccacttctgtggacctaacgtcatcagacatttcttctgtgacattccccagttgttaaatctatcctgcactgacactttttttgcacacgtagagcttctcatattaacaatgttgttttgtatttcaaatgctttagtcatcataatatcctatggctatattgtcttgtccattctgaagatcacttcagctaagggtaggtccaaggcattcaatacttgtgcttctcacctgacagctgtttccctattctacacctccactgcttttgtctattttagttccagctctggtggctcctccagctttgatagatttgtgtctgtcttctacactgtgttgattcctatgttgaaccctttggtttatagtctgaggaacaaggaaatcaaagatgctggaaagaggttacagaagaagctgggatgctgctaa

SEQ ID NO: 452 - DNA, 939 bp, Mus musculus
  MOR214-3
atgattggggaaagaaatattaccaagatcacccagttcatcctcctgggattctcagatttccccagaatcacagtacctctttttgtaatgtttttgatgatctacactttggctgtaacctggaacttttcccttattgctttaataagattggattcccaccttcacacacccatgtatttcttcctcagtaatctctccattatagacatctgctatatcacttccacagcccccaagatgctttccaacttcttccaggaaaagcaaactatcagctttgtgggctgcatagttcaatactttatcctttccactatggggctgactgaatcttgcctcatgacagccatggcctatgacaggtatgctgccatttgtaaccctcttctgtactcatcagtcatgtcacccacactatgtgctcagatggtgatgggaagctacacagctggactcacaggctctgtatctcagatatgtgccttgctgcagctctatttctgtggccctaatgtcattaggcatttcttctgtgacatatctcagctattaaatctatcctgtagtgatgctttctttgtacaggtccttcttgctatattaaccatgtgttttggaatagcaaatgccttagccaccatgctgtcctatggtttcatcgtcctgtccatcttaaagatcacttcagctaaaggcaggtccaaggccttcaacacctgtgcttctcacctgacagctgtttctctcttctatagtactgccatctttgtctatttgcgatccagctctggtggctcctctagttttgacagatttgcatctgtcttctacactgtggtgattcctatgttgaaccctttgatttatagtctgagaaacaaggaaatcaaagatgccatgaagcggttgcagaaaaagaaaatttgcagctaa

SEQ ID NO: 453 - DNA, 939 bp, Mus musculus
  MOR214-4
atgattgggggaagaaatattaccaagatcactcaatttatcctcctgggattctccgatttcccccaaatcacagcactgctttttgttatgttccttaccctgtatattacagcactgacctggaacctgtcccttgttgttttaataaggatggactcctatctccatacacctatgtacttcttcctcagtaatctgtcctttatagacttctgctatatctcttctacggtcccaaagatgctttccaacctcttccaggaaaagcaaactatcagctttgtgggctgcatagttcaatactttatcttttccactatgggactgagtgaatcttgcctcatgacagccatggcctatgacaggtatgctgccatttgtaaccctcttctgtactcatcagtcatgtcacccacactatgtgctcggatggtgatgggaagctacacagcagggcttgtaagttctttatctcagatatgtgtcttgctgcagctccatttctgtggacctaatgtcatcagacatttcttctgtgacatgccccagctgttaaatctatcctccaatgacactttctttgcacatgtcctacttgtcatattaacaatgttttttgggcttataaacgccttagccatcatggtgtcctatgggtatatcgcctcgtccatcatgaagatcacttcagtgaatggtaggtccaaggccttcaacacctgtgcttctcacctgacagctgtttctctcttctatagttctggtatctttgtctatttgagttccagctctggtggctcctccagctttgacagatttgcatctgtcttctatagtgtggtgattcccatgttgaatcctttgatatatagtctgagaaacaaggaaatcaaagatgccatgaataggttgcagaaaaaggtaatctgcagctaa

SEQ ID NO: 454 - DNA, 948 bp, Mus musculus
  MOR215-1
atgcctggagggaggaatagcacagtcatcaccaagttcatccttgtgggattctcagattttccaaagctcaagctggttctctttgttatcttcctgggaagttatctctccacagtggtgtggaacttgggcctcatcatcttgattaggattgacccttacctacacacacctatgtacttcttcctcagcaatttgtcatttttagatttctgttacatttcatctacaacccctaaaatgctctcgggattcttccagaagtctaaatctatctcctttgttgggtgcaccatgcagtacttcatcttctcaagcctgggtctgtccgaatgctgccttctggcagccatggcttatgaccggtatgctgccatttgtaatcctcttctctacacagccatcatgtccccgtcactctgtgtgcacatggtggttggagcctatagtactggtctcttgggttcattgattcaactgtgtgctatacttcagctccatttctgtgggccaaatattataaaccatttcttttgtgacctgcctcagctattagttctttcctgctctgaaacctttcccctgcaagtcttgaaatttgtaatagcagtgatttttggggtggcatctgtcattgttatcctgatatcctatggttatatcattggcacaatcctgaatatcagctcagtagaaggtaggtccaaggcattcaatacctgtgcctctcacctgacagcagtcaccctcttttttggatcaggactctttgtctatatgcgccccagctccaacagttcccagggttatgacaagatggcttccgtgttctatacagtggtgattcccatgttgaatcctctgatttatagtctcaggaacaaggaaataaaagatgctcttcagagatgtaaaaataagtgcttttctcagtgccactgttag

SEQ ID NO: 455 - DNA, 957 bp, Mus musculus
  MOR215-2
atggctgtgggaagaaacattagcgtggtgactaatttcatccttttgggatttttagagcgtccccagctgcagattgtcctctttgtgttgtttctggggatctacctggtgaccctggctggaaacttgggcctcattgtcttgatcaggatggactcacacctccactcccctatgtacttcttccttagtaatctgtcctttgttgatgtctcatacacctcctccatagcccctaagatgctctgtgatttctttagggagcagaagtctatcacctttataggctgtgctatacagcttttcttctttgttgggatgggaggtactgagtgctgtctcctggcagccatggcatatgacagatacgttgctatctccaaccctctactctatccatccctcatgtcacccaccatctgtgtggggatggccatcacagtatacacaggagggttcctcactggcttgatccaaactagctccatattccgacttcatttctgtgggccgcgggtcattaatcattttttctgtgacttgccacccctaatgtccttgtcttgctctagcacttttttcagccaagtagtgaacttcctggttgtgtgtgtggttggtggggcatcagcactggttgtcttggtctcctatggctacatcattgctgccgtcatgaggattcattcaacccatgggcagatgaaagctttcaacacctgtgcctcttatctgactacagtgatccttttctatggctctggtctcttctcatacctccattctaatgctggatactcacaggacaaaaataaggtggtgtccatgttctatggtgcagtgattcccatgttgaaccctatcatttatagcctaagaaataaggagatcaaagaagcattgaagaaactcaagaagaggaagaagcagatgtcctgtctctgtgctatgtag

SEQ ID NO: 456 - DNA, 954 bp, Mus musculus
  MOR215-3
atggctctaaccaacacatggaacagctcatcagtaaccatgttcatcttcttgggattctcagaccacccagaactccgaatcttcctctttctgactttcttgagcatctatcttgtgaccttgacctggaacctggccctcatctttctgatcagaggtgacatccatttacacacacccatgtacttcttcctcagcaatttgtccttcgttgacatttgctactcatcctctgtagctcccaagatgctctctgatttctttcgagagcaaaagactatctcattcctgggatgtggtgctcagttcttcttctttgtgggtttgggcctaactgagtgcttcctgctgacagcaatggcatatgatagatatgcagccatctctaaccccctgctctacaccaccatcatgccccagggtctctgcatgcgcatggtggctggggcatatcttggtggcttcctgagttcttttattcaggccagttccatatttcagctccacttttgcgggccaaatgtcatcaaccacttcttctgtgacctcccaccaatcctggcactttcttgctctaacacgttcctcagccaagtggtgaatttcctcatagtgatcacagtaggtgggacgtcatttctcatcctgctgatctcctacagttacatagtgtctgctgtcttgaagatccactctgtgagaggccggtggaaagccttcaacacatgtgcctcgcacctcatggcagtgaccatgctgtttgggacggcacttttcatgtacctgcggcccagctccagctactcatttagcagagacaaggtagtgtctgtcttctattcgctggtgattcccatgctgaaccctctcatttatagtttgaggaacaaagaaatcaaagatgccctgtggaaagtgatggagagaaagaaagtgtttcctaacttgtga

SEQ ID NO: 457 - DNA, 942 bp, Mus musculus
  MOR239-2
atggagatggaaaactacaccaggatcaaagaacttattttccttggccttacccaaagtcagcaagtaagcgcagtgctctttctttttcttctcctggtgtatgtgacaactctgctggggaaccttctcatcatggtcacagtgacctgtgagtctcgccttcacacccccatgtatttcttgctcaggaatttgtctgttgctgatatctgcttttcctccatcactgcccccaaggttcttgtggatcttacctcaaacagaaagaccatctctttcaatggctgtctcactcagatgttcttcttccaccttattgggggagtggatgcattttctctgtctgtgatggctctagatcgatacgtggccatctctaagcccttgcactatgtgaccatcatgagcagaggccgttgcattgggttaatagtggcctcctgggtggggggctttgcccactccatagtgcagatttctctcttgctgacacttccattctgtggacccaatgttcttgatactttctactgtgatgtcccccaggtcatcaaacttgcttgcacagacattgttgttcttgagctgctgatgatttccaataatggaatgctcaccacactatggtttttcttgttactggtgtcctacatggtcatattattattgctgaagtctcaatcaggagagggcaagaaaaaagccatctccacttgcaccacccacatcactgtggtcaccctgcattttgtcccctgcatttatgtctatgccagaccattcactgccctccccacagataaagtcatctctgtcaccttcacagtcatctcccctctgctaaaccccttgatctacactctgaggaaccaggaaatgaagtcagccatgaggagactcaggaaaaaatttcgattttctcattggatagagaaataa

SEQ ID NO: 458 - DNA, 933 bp, Mus musculus
  MOR239-3
atggagctgagaaatgacaccagagtaaaagaatttatatttctgggtctcactcagtcacaacacctgagcctggtcttatgtcttgttttgtgttttgtgtacgtgacaactctgcttgggaatctgcttatcatgattatcgtgacctttgagtcccgtctgcacacgcccatgtacttcctgctccgaaaccttgccgttctagacatctgcttctcctccatcacagccccaaaggtcttggtggaccttctggcaaagaaaaagaccatttcctacgcaaaatgcatgacacagatgtttttcttccatctgcttggtggagcagacattttttctctctctgtgatggcatttgatcgatacatggccatctccaagcccctgcactatgtgaccatcatgagtagtaagcggtgcacagccctcatcgcggcctcctgggtgggcggctttgtccactcgattgtgcagatctccctcttgctcccactccccttctgtggacccaatgttcttgataccttctactgcgatgtcccacaggttctcaaacttgcctgcacagacacctttgttcttgagctcctgatgatctcaaacaatggcctggtcactaccctatggtttatcttccttctggtgtcctacatggtcatcttgatgatgttgaggtctcaggcaggagaagacagaagaaaagccatctccacctgcacctcccacatcactgtggtcaccctgcattttgtaccctgcatctatgtctacgccagaccattcactgccctccccacagataaagccatctctgtcaccttcacagtcatctctcctctgttgaaccccttgatctatactctaaggaaccaggaaatgaagtcagccataagaagactaaagagaaaactcactcctcttgaaaagtaa

SEQ ID NO: 459 - DNA, 936 bp, Mus musculus
  MOR239-4
atggagctgggaaatcacactaaggtgactgaatttattttttgtggccttacccagtctcaagaactgagcttactcttatttttctttttatctattgtttatataacaacggtgttggtaaatgtcaccatcatggtcactgtgacctgggagtcccgcctccacacgcccatgtacttcctgcttcgaaacctctctgtgttggacatttgcttctcctccattactgttccaaaggtcttagtggaccttctctcaagaagaaagaccatctctttcaatggctgcttcactcagatctttttcttccatctgcttggtggggcagacattttttctctctctgtgatggcatttgatcgatacatggccatcttcaggcctctgcactatgtgaccatcatgagtagagggcggtgcacagccctcatcgcagcctcctgggttggaggctttgtccactcaattgtgcagatcttcctcttgctcccacttcctttctgtggacccaatgttgttgatagtttttactgtgatgtcccacaggtcctcaaactcgcctgcactgacacctttgttctcgagctcctgatgatctcaaacaatggcctgatcactacgctatggtttgttcttctccttgtatcctacacagtcatcttgacaatgctgaggtcacacacaggagagggcaggaagaaagccatctccacctgcacctcccacatcactgtggtcaccctgcactttgtgccctgcatctatgtctatgccaggcccttcactgccctccccatggacagagctgtctcaatcaccctaaatataattgttcctgtcctgaacccaatgatctacaccctcaggaaccaggagatgaaatcagccatgaagagactccggaaaagactcatactttctgaggtagaatag

SEQ ID NO: 460 - DNA, 945 bp, Mus musculus
  MOR239-5
atgagccagataaaccacaccaatgtgaaagaattcgtcttcctggcacttactcgcatccgggaactggagttctttttgttctcagtcttctttcttgtgtatgtaacaactgtgctgggaaacaccctcattgtggttaccatcactgctgagtctcgcctccacactcctatgtacttcctcttgaggaacaaatccattctggatattgtcttttcatctatcacagtccccaagttcctggtggatcttttatcagaaaggaaggccatctcctataatggttgtttaacacagatctttttcttccactttgctggtggggcagatattttcttcctctctgtgatggcctatgataggtaccttgcaattgctaaacccctgcactatgtaaccattatgaggagagaggtatggttggccttggtggtggcctcctgggtgggtggtggtttacattcaattgttcagataattctaatgcttccactccccttctgtggccccaacaccttggatgccttttactgtgatataccccaggtggtgaagctggcctgcactgatacctttgccctcgaacttctcatgatctccaacaatggcctggtaaccctgttgtggttcttcctgctcttaggctcctacaccatcattctggttatgctcagatcccattctggggagggacggaacaaggctctctccacctgcacctctcacatcatggtggtgactctccattttgtgccctgtgtttatatctattgcaggccctttaccaccctgcccatggacacagccatatctatcaataacactgtcatcacgcccatgttaaaccccatgatctacactctcaggaaccaagagatgaagtcagccatgaagagactgcagaggaggctagggccttctgagagcaataagctagggtga

SEQ ID NO: 461 - DNA, 963 bp, Mus musculus
  MOR210-1
atgggcgacagggaaacaagcaatcattcagatatgactgactttatccttgtaggcttcagggtcagtcctgagctccatatcctccttttcctgctctttctgcttgtgtatgccatgatccttctaggaaaccttgggatgatggccatcattatgactgatcccaggctgaacacaccaatgtatttcttcctaggcaacctctccttcatcgacctcttctactcatctgttattgcaccaaaggctatgagcaacttttggacagagagcaagtctatctcatttgcaggctgtgtggcccagatctttctctttgcactgttcattgtggctgaaggatttctcctggcagccatggcttatgaccgtttcattgccatctgcaacccactcctgtattctgttcacatgtccacacgtctctgcactcagctggtggcaggctcttatttttgtggctgtatcagctctgttctccagactagcatgacatttactttatccttttgtgcttctcgagccattgaccacttttactgtgatagtcggccacttcagagactctcctgttctgacattttcatacacaaaatagtatctttttctttatctggcatcattatcttaccaactatcacagtcatcattgtttcctacatgtatattgtgtccactgttctaaagatacgatccgtggagggaaggaagaaagccttctccacttgcagctctcacctgggtgtcgtgagtgtgctgtatggtgctgttttcttcatgtatctcacccctgacagatttcctgaactgagtaagctggcttctttgtgctattccctagtcacacctatgctgaaccctctgatttactctctgagaaacaaagatgttagagatgctttaagcaaacttctagagaagaaaaaatgcagtggttcgtttttcccattctacaagtag

SEQ ID NO: 462 - DNA, 942 bp, Mus musculus
  MOR210-2
atgggcgacagggaaacaagcaatcactcagatatgactgactttatccttgtaggcttcagggtcagtcctgagctccatatcctccttttcctgctctttctgcttgtgtatgccatgatccttctaggaaaccttgggatgatggccatcattatgactgatcccaggctgaacacaccaatgtatttcttcctaggcaacctctccttcatcgacctcttctactcatctgttattgcaccaaaggctatgagcaacttttggacagagagcaagtccatctcatttgcaggctgtgtggctcagctttttctctttgcactgttcattgtggctgaaggatttctcctggcagccatggcttatgaccgtttcattgccatctgcaacccactcctgtattctgttcacatgtccacacgtctctgcactcagctggtggcaggctcttatttttgtggctgtatcagctctgttctccagactagcatgacatttactttatccttttgtgcttctcgagccattgaccacttttactgtgatactcgaccagttcagagattatcttgtaataatctttttgtccataaaatagtatccttttcattatccagcatcattatcttaccaactgtcatagtcatcattgtttcctacatgtatattgtgtccactgttctaaagatacgatccgtggagggaaggaagaaagccttctccacttgcagctctcacctgggtgttgtgagtgtgctgtatggtgctgttttcttcatgtatctcacccctgacagatttcctgaactgagtaagctggcttctttgtgcttttccctagtcacacctatgctgaaccctctgatttactctctgagaaacaaagatgttagagatgctttaagcaaacttctagagaagaaaaagttcattctttaa

SEQ ID NO: 463 - DNA, 939 bp, Mus musculus
  MOR116-1
atggcaaaccactcatcagtgacaaaattcattcttcttggattgacaaatgatatcaaccttcaagctgtgctttttctctttctcatcttaacttatatcttaagtgtcatgggaaactcggccatcattctcttgactctgctggatcaccgcctccagacgcctatgtatttcttcctccgaaattttgcgtttttggagatatcttttacctctgtctttgttcccaagatgctaatcaatattggaactggagacaagactatttcctttgctggttgcttcacacagtattttttcgcaatccttctgggagcaaccgaattttacctcttagcagtgatgtcctatgaccgctatgttgccatttgcagacccctgcattacacaactatcatgagccggagactttgcttccaactagttttaagttcctggttatctggttttatagttgttgctgtgccacatgcaatgactcttcagttgcctttctgtgcatccaacatcatcaatcattattgctgtgactacactatattgctgcatttatcatgttcagacacacacttcatagaagtgatccagttcctcctggctgctgtgaccctcatcctcaccttgctgttggtgattctctcctacacacacattatcaagaccattttgaggatcccttctgctcaacagagaaaaaaggctttctctacatgttcctctcacatgatagtggtctcactctcttatggaagctgtattttcatgtatataaatccttcttttaaagatgcagcaaattttaataagagagtagctgttttaaatacctctgttgcacctctgttaaacccattcatctacactcttagaaacaagcaagtaaaaatagccttcaaagatatgctaagcaagactataagtttctttaaaaagtaa

SEQ ID NO: 464 - DNA, 948 bp, Mus musculus
  MOR210-3
atgaaactggagcagagcaggaactatactgagctgacagactttatcctgctgggattctggacgtctccagaagcacaggttcccttattcttactgttcttgtttatctatctggtcattttattgggaaacctcagcatgctaactgtcattaaaatagactccagacttcatacaccaatgtatttctttctccaaaatttatcctttttagatctctgctattccacagtcattgcacccaaaactctagctactattttctccaaggaaaagaaaatttcatataatgaatgtgcaacacagttctttttctttgctcttttcgttggaacagaaggttttcttttggctgtgatggcttatgaccgcttctcagccatttgctcgcctttcctgtacacagtccatatgtctcagccagcttgtattcgtttggtggctggctcctatatctgtggatgcatcaactccatgatacaaacaggattcaccttcagcttgcgtttctgtggagaaaacaggctggaccactttttctgtgatgtcccagctctgatcaagatctcatgtgttgacacttttgtgaatgagattgtgttgtttattctctctgctctcatcatcatctccaccatcactatcattctggtttcctatgcctacatcctttccactgtcctgaagatcccctccacccatggtaggagtaaaaccttctctacatgtggctctcatatagcagtggtgagtttattctatggaacagtgttcttcatgtatgctcagcctgggtccatctcctccccagagaaaagcaagattgtagctgtgttctacacacttatcatcccaatgctgaatcctctgatttatagcttaaggaatacagaggtaaaaagtgctttgaagaagacattgctgagaaaaatatcctggcagtga

SEQ ID NO: 465 - DNA, 948 bp, Mus musculus
  MOR210-4
atgaaactggagcagagcaggaactatactgagctgacagactttatcctgctgggattctggacgtctccagaagcacgggttcccttattcttactgttcttgtttatctatctggtcattgtattgggaaacctcagcatgttaactgtcattaaaatagactccagacttcatacaccaatgtatttctttctccaaaatttatcctttttagatctctgctattccacagtcattgcacccaaagctcttgctacttttttctccaaggaaaagaaaatttcatataatgaatgtgcaacacagttctttttctttgctcttttcgttggaacagaaggttttcttttggctgtgatggcttatgaccgcttctcagccatttgctcgcctttcctgtacacagtccatatgtctcagccagcttgtattcgtttggtggctggctcctatatctgtggatgcatcaactccatgatacaaacaggattcaccttcagcttgcgtttctgtggagaaaacaggctggaccactttttctgtgatgtcccagctctgatcaagatctcatgtgttgacacttttgtgaatgagattgtgttgtttattctctctgctctcatcatcatctccaccatcactatcattctggtttcctatgcctacatcctttccactgtcctgaagatcccctccacccatggtaggagtaaaaccttctctacatgtggctctcatatagcagtggtgagtttattctatggaacagtgttcttcatgtatgctcagcctgggtccatctcctccccagagaaaagcaagattgtagctgtattctacacacttatcatcccaatgctgaatcctctgatttatagcttaaggaatacagaggtaaaaagtgctttgaagaagacattgctgagaaaaataccctggcactga

SEQ ID NO: 466 - DNA, 939 bp, Mus musculus
  MOR113-1
atgaagaaccatacagaggtgacagttttcatcctagcaggtttgactgatgacccacagtggaaagttgtgttattcatcttcctgcttcttacctatctgcttagcgtcactggaaatctgaccatcatcacactcacactggtggatactcacctgaagacacccatgtatttcttccttcggaatttttctttcttagagttttcctacactactacatgcatccccaaattgcttgttactatggcaactggggacaaaaccatttcctatggtaattgtgtgactcaagtgttttttgctttcttatttggagcatcagaattttatttgctggcagccatgtcctatgacagatatgtagccatctgcaagcccctgcactatatgaccatcatgaacaataaagtctgtgtgcagctggtcctcagttgttggcttgctggcttttttgtcatctttccaccactcgtgttaggcttgaatcttgaattctgtgcttccaacattgttgatcatttctactgtgacacaactccacttcttcagatttcttgcacagacacacagctcctggagacgatgggatttgtctcagctttggtgacactcttactcacgctggtaatggtgatcatatcctacacctacattgctataacaattctaaaaattccttcaaccgaacagaggaagaaggctttctctacatgctcttcccacatgattgtaatatccatctcatatggcagctgcatcttcatgtatgttaaaccatcagtcaagcagagaatatctatttccaaaggaatttctgtgctcaatacctcagtggctccacttttgaatccttttatctacaccttgaggaatcagcaagtgaagaaagcattcattactacagtacacaggattgcatcttcctcgaagaaatga

SEQ ID NO: 467 - DNA, 939 bp, Mus musculus
  MOR113-2
atgaagaaccatacaagggtgacaattttcatcatagcaggtttgactgatgacccacagtggaaagttgtgctattcatcttcctgcttcttacctatctgctcagcatcactggcaatctgaccatcatcacactcacactggtggatactcacctgaagacacccatgtattttttccttcggaatttttcctttttagagatttcctacactacaacatgcatccccaaattgcttgttactatggcaacaggggacaaaaccatttcttacaataattgtgctgctcaagtattctttgctttccttcttggagcatcagaattttatttgctggcagccatgtcctatgacagatatgtagccatctgcaagcccctgcactatatgaccatcatgagcaataaagtctgtgtgcagctggtcctcagttgttggcttattagttttttaatcatctttccaccactagtgttaggcttgaatctcgacttctgtgcttccaacatcattgatcatttctactgtgacacaactccacttcttcagatttcttgcactgacacacagctcatagagacaattgcattcatctcagctttggtgacactcttactcacactggtaatggtgatcatatcctacacctacattgctatgacaattctaaaaattccttcaaccagccagaggaagaaggctttctctacatgctcttctcacatgattgtaatatccatttcatatggcagctgcatcttcatgtatgttaaaccatcagtcaaacagagagtatctatttccaaaggaatttctgtgctcaacacctcagtggcaccacttctgaatccttttatctacaccttgaggaatcagcaagtgaaaagggcattcattaatacagtacacaggattgtgtctttctcaaagaaatga

SEQ ID NO: 468 - DNA, 951 bp, Mus musculus
  MOR113-3
atgatatcacaaagagaaatgaagaaccatacaagacagatagagtttatccttcttggactgacagataatcctcagttacagactctgatttttgtgtcccttttactaaattacttgctgagtatgctcgggaatttagctatcattgccctcactctgctagatcccattctcaagacaccaatgtattttttcctccgtaatttctctttcttggaaattttatttacaacaacctgcattcccagatttttaatctctattgtaacacaggagaagacaatttcctataatggctgtgtttgtcaattattcttttatatatttttgggggccacagagtttttcttcttggctaccatgtcctatgaccgctatattgccatctgcaaacccttgcactatgcatctatcatgaacagtaaagtttgtcatcagcttgtcctgggttcttgggtaactggattcctggttattttcccaccactgattattggccttgatttggatttctgtgcttcaaatgtcattgaccatttcctttgtgatgtttctcctctcctacagctctcttgctcaaacacaaatttactagacctgatggctttcatcttagctctcatgacactcattgtcacattagtaatagtgatcttttcttatgctcacattgccaagacaattatgaaattcccttctgttcagcaaaagaaaaaggccttttccacttgttcttctcacatgattgttgtttcccttacttatgggagttgcatatttatctacataaagccttcagcaaatgaaagagtgactttgagcaaaggaatagctgtgctcaacacttcagttgcccctttgttgaacccatttatttatacactgaggaataagcaagttaaacaagcctgtggtgtagtacttagaaaaatattttctgcttcataa

SEQ ID NO: 469 - DNA, 975 bp, Mus musculus
  MOR106-1
atgtctctttttccccaaagaaatttagatgccatgaacagatcagcagcacatgtaaccgaatttgttctcttgggatttcctggttcctggaagatacagattttcctcttcgtgttgtttttggtgttttatgtcttgacattgttgggaaatggagccatcatctgtgcagtaagatgtgactcacgtctacatacccccatgtacttcctcctgggaaatttttccttccttgaaatctggtatgtttcctccactattcctaacatactagccaacattctgtctaagaccaaggccatctcattttcagggtgcttcctgcagttctatttcttcttttcactgggtacaactgaatgtctcttcctggcagtaatggcttatgataggtacctggccatttgccgcccattacattaccctactatcatgactaggaggctgtgttgcattctggtatcctcatgctggctcattggatttcttgggtacccaatccctatcttctccatttcccagcttcccttctgtggttctaatatcattgatcacttcctctgtgacatggacccattgatggctttgtcctgtgccccagctcctattactgaatttattttttatgcccaaagttcctttgtcctctttttcactattgcatacattcttcggtcctatattttgttgctcagggctgtttttcaggttccttctgcagctggccgacgaaaagccttctctacctgtggttcccatttagttgtggtgtcactcttctatggtacagtaatggtaatgtatgtgagtcctacatatggcattccaattttgatgcagaagatccttacacttgtatactctgtaatgactcctctctttaatcctctgatttatagccttcgtaacaaggacatgaaacttgctctgagaaatgttttgttaggaatgagaattgtcaaaaatatgtaa

SEQ ID NO: 470 - DNA, 930 bp, Mus musculus
  MOR106-2
atgaaaaccctcagcagctccaacaacaccatcactggcttcatcctcttgggcttcccctgccccagggaggggcaaatcctcctctttgtgctcttcttcattgtctacctccttaccctcatgggcaatgcgtccatcatatgtgctgtgtgctgtgatcagaaacttcacagccccatgtacctcctgctggccaacttctccttcctggaaatctggtatgtcacctccacagtccccaacatgttggctaacttcctctctgaaaacaaggtcatttccttcgctggatgcttcctgcagttctatttcttcttctccttgggttctacagaatgctttttcctggcagtcatggcatttgatcgataccttgccatctgcagacctctacattatccttctctcatgactgggcgcctctgcaacatccttgtgatcagttgctgggtgcttggtttcctctggttccctgttcccatcatcatcatctcccaaatgtccttctgtggatccagaattatagaccacttcctgtgtgacccaggccctctgttggccctcacctgttccagagctccattaatggagtttttctgggcaattttaagttctatgctcctgtttattccttttttctgcatcatgggatcttatatattggtcctaagagctgtgttcagagttccttcaagagatggacaaaaaaaggctttctccacttgcggatctcatctcacagtagtttcacttttttatggctcagtgatgataatgtatctgagcccaacatctgagcatgaagctggaatgcagaagcttgtaactctattttattctgtggttactccactcattaatccggtgatatacagtctgaggaacaaagatatgaaaaatgccctgcagaagattttaaaaacataa

SEQ ID NO: 471 - DNA, 936 bp, Mus musculus
  MOR106-3
atgaaagcctttagcagccccagcaactccagcatcatcactggcttcatcctcctgggcttcccctgccccaaggaggggcaaatcctcctctttgtgctcttcttcattatctacatccttaccctcatgggcaatgcttccatcatatgtgctgtgtgctatgataagaaacttcacagccccatgtacctcctgctggccaacttctccttcctagaaatctggtatgtcacctccacagtccccaacatgttggccaacttcctctctgacacgaaggtcatctctttctctggatgcttcctgcagttctatttcttcttctccttgggttctacagaatgctttttcctggcagtcatggcatttgatcgataccttgccatctgcagacctctacattatccttctctcatgactgggcgcctctgcaacatccttgtgatcagttgctggatgcttggtttcctctggttccctgttcccatcatcatcatctcccaaatgtccttctgtggatccagaattatagaccacttcctgtgtgacccaggccctctgttggccctcacctgtgtgagaaattctttaattgagatgactagctctactttaagttccttgcttttatttgttccatttttttttatcatggggtcttatgctctagtaatgagggctgtgctcagggtcccttcagcagctggacgaagaaaggccttctccacctgtgggtcacacttgactgtggtttctcttttctatggctcagtgatggtcatgtatgtgagcccaacatctgaacatgcagctggagtgcaaaaacttgtgactctgttttattctgtggttactcccctccttaatcctgtgatatacagtctgaggaacagagatatgaaacatgcaatgaaaaagttactgaaaatgtaa

SEQ ID NO: 472 - DNA, 936 bp, Mus musculus
  MOR106-4
atgaaaaccttcagcagccccagcaactccagcaccaccactggcttcatcctcttgggcttcccctgccccagggaggggcaaatcctcctctttgtgctcttctccattgtctacctgcttaccctcatgggcaacacttgcatcatctttgcagtatgctgggatcagagactccacacacccatgtacctactgctggccaacttctccttcctggagatctggtatgttacctccacagtccccaacatgttggccaatttcctctctgacaccaaggtcatctctttctctggctgcttcctgcagttctatttcttcttctccttgggttctacagaatgccttttcctggcagtcatggcatttgatcgataccttgccatctgtaggccactacattatcctgctctcatgactgggagcctctgcaacatccttgtgatcagttgctgggtgcttggtttcctctggttccctgttcccatcatcatcatctcccagatgtccttctgtgggtccagaattatagaccacttcctgtgtgacccaggccctctattggccctcacctgttccagagccccattaatggaggttttctggacaattataacatctcttatcctgttcgttcctttcctcttcatcatgggatcttatacattggtcctgagagctgtgttcagagttccttcaagagatggacaaaaaaaggctttctccacttgcggatctcatctcacagtagttttactcttttatggctcagtgatgataatgtatctaagcccgacctctgagcatgaagctggaatgcagaagcttgtgactctattttattctgtggttactccactcgttaatcctgtgatatacagtctgaggaacaaggatatgaaacatgccctgcagaagattttaagaacataa

SEQ ID NO: 473 - DNA, 939 bp, Mus musculus
  MOR106-5
atgacctcagccagaaatgcttcccatactgtgagtcacttcatcctcttaggcttcccttgccgcagagaaatacagatcttccttttctccatattctttatgatttacattttgactttgcttggaaatatggcaattgtgtatgcagtgtactgggatcatcggcttcatacacccatgtacattctgctggccaacttctccttcctagagatatgctatgtcaactctgatgtgccaaacatgctggtcaacttcctctccacgaccaaaaccatctccttcactcgatgcctactccagttgtacttcttcttctccctgggcacaactgaatgtctatttctctccatcatggcctatgacaggttcctggcaatctgccgcccactgcactaccccactgtcatgaccactatgttctgtggcaaccttgtcatattttgctgggtctatgggttcctctggtttcttatcccagtgatactcattactcagctgccattttgtgggccaaatgtgatagatgactttctttgtgaccttggtcccttgctggccctagcttcagtctgtgtcccaatcccaggcactgttctcatctgtggcactatgagttccctcctcatctttggcacatttttttatattattggttcatataccttagtgctgagggctgtgatccggatgccctcttctgctggttcaaagaaggcattctccacctgttcatcacacctggctgttgtatttctattttatggttcagtcatgataacatatgtaagcccaggatcaggacaagcaaagggcatgcagaagttcacaactttattctattcagttatgactcctttcttcaaccccatgatctatagcctccgaaataaagaaatgaaagatgccttgaaaaaggttgtaggaggttcttag

SEQ ID NO: 474 - DNA, 927 bp, Mus musculus
  MOR241-1
atggagacagaaaacaggacagttgtcacagaattcatcctcataggactgacccagtcacatgacattcagcgcttggtctttgttctgagcttaattttctacatcatcatcttgcctggaaatatcctgatcattctgaccatcagatcagaccctggacttactgcccctctttatttcttcttgggaaatttggccttcctggatgcctcctactccttcattgtggctcccaggatgttggtagacttcttctctgagaagaagataatctcctacaaagcctgtatcactcagctattttttttgcacttccttggagggggtgaagggttacttctggttgtgatggcctttgaccgctacattgccatctgcaggcctttacattattctactgttatgagccctagagcctgctatgtgatgttgttggctctctggcttggaggatttattcactccattattcaggttgtcctcatcctccgcttgcccttctgtggtccaaatcatctagataatttcttctgtgatgtcccacaggtcatcaagctagcctgtacagacacctttgcagttgagctccttatgatcttcaatagtggcctgcttaccctcctttgttttcttggtcttctgacttcctatgcagttattttatgccatgttcacaggtcagcttctgaaggaaaaaacaaagctatatctacatgtaccactcatgttatcattatatttattatgtttggacctgcaatttttatttatacacgtccattcactgccctatcagctgacaaagtcgtttccttcttccatacagtaatatttccactgatgaatcctgtgatttatacccttcggaatcaggaagtaaaaacttccatgaaaaagttaatcatccggcatattatttgttaa

SEQ ID NO: 475 - DNA, 942 bp, Mus musculus
  MOR242-1
atggaacctgcaaatgataccaccgtgaccgaatttattctcactggtctatctcagactcgggaagtgcagctagtcttgtttgttatatttttatccttttatttattcatacttccagtgaatatccttattatctgcacaatcaggcttgattcccatttgagttctcccatgtatttcctgctggctaatctagccttccttgatatttggtattcctctatcacagcgcctaagatgcttgtagacttctttgtggaaaggaagataatatcctttggtgggtgtattgctcaactcttcttcttgcactttgtcggggcctctgagatgttcctgctgacagtgatggcttttgaccgctacgctgccatctgccgccctctccactatgctaccatcatgaaccgccggctctgttgtatcttagtggccctctcctggacagggggcttcgtacattctataatacaggtggctctcattgttcgactcccattttgtgggcccaatgaactagacaattatttttgtgacatcactcaggttgtccggattgcttgtgccaatactttcctggaagaaatggtcatgatctttagcagtggcctgatctctgtggtatgcttcattgctctgctaatgtcctatgcctttcttctgaccatgcttaagaaacactcaagctcaggtgagagcaccagcagggctatatccacttgttattcccacatcaccatagtggtgctaatgtttggaccatccatctacatttatgctcgcccatttgactcgttttctctagataaggtggtgtctgtgtttcatactgtgatattccctttactcaaccccatcatctatacattgagaaacaaggaagtgaaggcagccatgagaaagctggtgaatagatatattttttgcaaagaaaagtga

SEQ ID NO: 476 - DNA, 927 bp, Mus musculus
  MOR241-2
atggagacagaaaacaggacagttgtcacagaattcatcttcacaggactgacagagtcacttgacattcaacgcttggtctttgttctgagcttaattttctacatcatcattttgcctggaaatgtcttcatcatcctcaccatcatatcagaccctggacttactgcccctctttatttgttcctgggaaatttggccttcctggatgcctcctactccttcattgtggctcctaggatgttgatagacatcttctctgagaagaagataatctcctacaaagcctgcatcactcagctattttttttgcacttccttggaggaggggaatttttactactggttgtaatggcctttgaccgctacattgccatctgcaggcctttgtattactccactgtcatgaatcccagagtctgctatgtgatgttgttggctccctggcttggaggatttattcactccattattcaggttgtcctcatcctccgcttgcccttctgtggtccaaatcatctagataatttcttctgtgatgtcccacaggtcatcaagctagcctgtacagacacctttgcagtcgagctccttatgatcttcaatagtggcctgcttacccttgtgtgctttcttggtcttctgacttcctatgcagttattttatgccatgttcacaggtcagcttctgaaggaaaaaacaaagctatatctacatgtaccactcatgttatcattatatttcttatgtttggacctgcaatttttatttatacacgtccattcactgccctatcagctgacaaagtggtttctttcttccatacagtaatatttcccttattgaatcctgttatttatacccttcgaaaccaggaagtaaaaacttccatgaaaaagttatttattcgtcaagtaatttgttaa

SEQ ID NO: 477 - DNA, 939 bp, Mus musculus
  MOR138-1
atgaacaaccacagcagcagcagcagcagcacctcagacttcatcttgctgggtctctctaccaatccctggatgcagaaacccctttttggcatcttcatcataatgtacctggtcacagtgatggggaatgtgctcatcatcctggtcatccgctctgattccaggctccatacacccatgtacttcttccttagcaacttgtcattcatggatatctgcttcacaacagtcattgtacccaagatgctagtgaactttctctcagagacaaagactatctcctatgtgggatgcctagttcagatgtacttcttcatggccttagggaacactgatagctacctgctagcctccatggccattgaccgactggtggccatctgcaaccctttacattatgatgtggtgatgaggccacaacgctgcctcctcatgttgctgggttcttgcaccatctcccatctgcatgcactgttccgtgtccttctcatgtctcgcctctcattctgtgcttcccatgtcattaagcactttttctgtgatactcagcctgtgttgaagctgtcctgctctgacacatcctccagccagattgtggtcatgactgagaccctggctgtcattgtcactcccttcctatgcatactcttctcctacatgagaatcattgtcactgtgctcaggattccctctgcagctggaaaatggaaagccttctctacttgtggctcccacctcactgtagtggtcctgttctatgggagtatcatctatgtctactttaggcctctgtccatgtactcagtggtgaaggaccgggtagctactgttatgtatacagtagtgacacctatgatgaatcctttcatctatagcctgaggaataaagatatgaagagaggtttgaggaagttaatgggtaaagttcacctgtag

SEQ ID NO: 478 - DNA, 957 bp, Mus musculus
  MOR264-6
atggatggatccaccctacaaagtccccaacagaaccactccacatttgtagcattcatcttacttggcttttctgatgttcccaacttgcaagaatttctttttgggttgtttttgatggtctatctaattattctgatgggcaatagcctcattatcataattataagagctgacccttccctgcaaactcccatgtactttttccttggaaatttttctttcttagaaatgtgttatgtgtcagtcactctgccaaggttattaacagatctctacagacaagacagaatcatttctttcatggcttgtgctacacaaatgtatttttttcttatctttggggccactgagtgctttattctgacggctatggcttatgacagatatgttgctatttgtaacccattgctctatcctctcattatgaacaatagtctctgtatacaactggcagctggctgttggataagtggagttcctgttcatatagggttcacatactggatcttctctctaccattttgtggatcaaatcagctgaatcactttttctgtgacatacctccagtcctgaccctagcttgtggggacacttttatgatagagatgctaatttatgtgattgcccttttagttgtcaccattccttttatgctgatccttgcatcttatgtgaaaataatctcaagcattctgaagcttccatctgcaactgggagagccaaggccttctctacatgttcttcccaccttatagttgtagctttattctttggatcaggtatcattacatacttgagaccaaagtccagccactcagcaggagtagacaaattcctttctcttttctatactgttgtgactccaatgttcaaccccatgatatactgtttaagaaacaaagatgttatgattgcattgaaaaaaatttttctgagatgcttcatgttatga

SEQ ID NO: 479 - DNA, 933 bp, Mus musculus
  MOR177-2
atggatgaaggaaactgctcctcaaacactgaatttgttttactgggaatcactaataaccctagcatgaaagtgggtctattcattgtatttcttatcatctatctcattattcttgtggcaaatattggaatgattgttttgattaaactggatccccagcttcacacaccaatgtacttcttcctcagccatctctctttctcagacctctgctattccactgcagttggaccaaagatgctagttgacctaatggtcaagcagaaaatcattccttttgttggctgtgcattgcaattttttttcacctgtatctttgtagatgctgagtgcatgctgctggcagtgatggcctttgatcggtacaaggccatcagcaatcctctgatgtatgtagtcggtatgtccagtaaattttgctatcaactcctagctggagtttacctagtaggaatgatagatactgtgatacacactataatgacctttgggttatgtttctatggatctaatgagatcaatcattttttctgtgacatccctcctatcctgctactatcttgctcagatacacagaccaatgagttaatcacctttgttatttttgggttcattgaactgagcaccatctcaggagtcctggtctcctactgttacatcatctcatcagtcttaaaaatccgctccactgatgggaggttcaaagctttctccacctgtgcctctcacttaactgcagttgccattttccagggaacactgctcttcatgtattttcgtcctgcttctgcttactctctggatcaggacaaaatcacctcacttttttataccctggtgatccccatgcttaaccctctgatttacagcctaaggaacaaggatgtacaagaggccctgcagaaactgaaaaagaaaatattcttttaa

SEQ ID NO: 480 - DNA, 933 bp, Mus musculus
  MOR177-3
atggacaagagaaactgctcatctgtgcctgagtttcttctgttgggaattaccaataagcctgaaatgaaagttgctttgttcatagtgtttctcattgtttacctcactattcttctgacaaacgtaggaatgatcacattgatcagaatggatccccagctccacacaccaatgtatttcttcctcagccacctctcattctctgatctctgctactccactgcagttggacccaagatgctcttagacctccttgaagataataatccaatttcttttgttggctgttttctccaactcctgattgtctcaatttttatagatgttgaatgcatgctgctggcggtgatggcctttgatagatacaaggccatcagcaacccccttatgtatgctgtggacatgtctagtagagtttgttaccagtttttaactgcaatctatgtgtttggaactatagatggtttcatacatacctcattggcattcagcttatgtttctgccactctactcagatcaatcatttcttttgtgatttacctccagtcttgcttctttcatgttctgatacacatatcaatgaactggtattatttatgctttttggtttcattgaactaagcaccatctcaggagttcttgtatcctactgttacatcatctcatctgtcttaaagattagttctactggtgggtggttcaaagctttctccacctgtgcctctcatctgactgcagttggaattttccaggggactatgctcttcatgtatttcagaccaagctctgcctactctctagatcaagataaaatgacatccatattttacctccttgttatccctatgataaaccctctgatttatagtctacgcaataaagatgtaaaagaagcattggtcaggctcagaagtaaatggtggttttaa

SEQ ID NO: 481 - DNA, 930 bp, Mus musculus
  MOR177-4
atggatataggaaactgttccttgaatgaattcatttttgtgggagttaccaataacccagagatgaaaggaacgctgtttaccatatttctcctcatctatctcatcaatcttctggggaatattggaatgatcattttgatcagaatggatcctcagctgcatacacccatgtactttttcctgagccacctgtctttctgtgatctttgctattccacagcaattggtcccaagatgctgctagatatgtttggcaagaacaagtcaattcctttctggggctgtgctctgcagctcttcattttctgtgtctttgcagattctgagtgtgtgctgctggcagtcatggcctttgatagataccaggccattagcaaccccttgctctacacagcaaacatgtccagcaggaagtgtttcatgttcatggctggagtttacctggtgggaacagcagatgctttgatacatacaactttggcattccgcttgtgtttctgcgggtctaatgagatcaaccacttcttctgtgatctacctccactttaccttctctcctgctcagatactcaagtaaattacctggcactatttactatttatggcttccttgaactgagcaccatctcaggagtccttgtttcttactgttacatcatctcatcaatcttaaaaatccgttcagctgaagggaggtttaaagctttctccacctgcacctctcacttgactgcagttgctatttttcaaggaactctactcttcacgtattttcgaccaagttcttcttattcccttgatcaagacaaaatgacatctctattttatacccttgtgattcctatgctgaacccactgatttatagtttaaggaacaaggatgtgaaagaggccttgaagaaaattaaaagaaaaagatggttttag

SEQ ID NO: 482 - DNA, 924 bp, Mus musculus
  MOR177-5
atgaatataggaaactgttccttgaatgaattcatttttgtgggagttaccaataacccagagatgaaagggacgctgtttaccatatttctcctcatctatctcatcaatcttctgggaaatattggaatgatcattttgatcagaatggatccccagctccacacacccatgtactttttcctgagccacctgtctttctgtgatctttgctattccacagcaattggtcccaagatgctggtagatatgtttggcaagaacaagtcgattcctttctggggctgtgctgtgcagttcttcatttcctgtacctttgcagattctgagtgtgtgctgctggcagtcatggcctttgatagataccaggccattagcaaccctttgctctacacagcaaacatgtccagcaggaagtgtttcatgttcatggctggcgtttacctggtgggaacatcagatgctttgatacatacaactttggcattccgcttgtgtttctgcgggtctaatgagatcaaccacttcttctgtgatctacctccactttacctgctctcctgctcagatactcaagtaaattacctggcactatttactatttatggcttccttgaactgagcaccatctcaggagtccttgtttcttactgttacatcatctcttcagtcttaaaaatccgttcagctgaagggaggttcaaagctttctccacctgcacctctcatttgactgcagttgctatttttcaaggaactctactcttcacgtattttcgaccaagttcttcttattcccttgatcaagacaaaatgacatctctattttatacccttgtgattcctatgctgaacccactgatttatagtttaaggaacaaggatgtgaaagaggccttggggaaaatgaaaagaaaaagatag

SEQ ID NO: 483 - DNA, 933 bp, Mus musculus
  MOR261-2
atgagagccaaccagacatggatcacagaggtaactctgctgggattccaagcagacctgagtgtggagtgtttcctctttgggcttttctctctgttttattcctttacccttctggggaatggaatcatccttgtagtaatctgcctggacaacagactgcacatacccatgtacttcttcctctctcatctggccattgttgacatgtcctatgcttccaataatgtccctaagatgctggcaaatcttgtaactcaaagaagaaccatctccttcattctgtgcataatgcaaacattcttgtatctggcttttgcttgcacagaatgcctgattttagtggtaatgtcctatgataggtttgtggccatctgtcacccccttcactatactgtcatcatgagttggaaagtgtgtaccatcctggcagctgtctcctggatagctggcttccttttggctctggttcatttggttctcatcctgaagctgcctttctgtggacctcatgaaatcaatcacttcttctgtgaaatcctgtctgtcctcaagctggcctgtgctgacacaacactcaatcaagttgttatcttagcagcctgtgtgttcatcttagtggggcccctgtgcttagtgctagtctcctacacacgcatcctggtgaccatcctgaggatccagtcaggggaaggtcgcagaaaggccttttccacctgttcctcccacctctgtgtggtagggctcttctttggcagtgccattgtcatgtacatggcccctaaatcccagcaccctgaactgcagcagaagatcctttccctgttttacagccttttcaaccctatgctgaaccccctgatctactgcctgaggaatgctgaggtcaagggcgccctccggagatcactgtggaaggagagaccaatgtaa

SEQ ID NO: 484 - DNA, 933 bp, Mus musculus
  MOR261-3
atgagagccaatcagacatggatcacagaggtcactctactgggattccaagctgacctagctgtggagtgtttcctcttcgggcttttctctctgttttattcctttacccttctggggaatggaatcatccttgtagtaatctgcctggacaacagactgcacacacccatgtacttcttcctctctcatctggccattgttgacatgtcctatgcttccaataatgtccccaagatgctggcaaatcttgtgactcaaagaagaaccatctccttcattccatgtataatgcaaacattcttgtatctggcctttgcttccatagagtgcctgattttagtggtaatgtcctatgataggtttgttgccatctgccacccccttcactacactgtcatcatgagctggagagtgtgtaccataatggctgctgtctcctggatagttggcttccttttggctcttgtccatttaattctcatcctgaggctgcctttctgtgggcctcataaagtcaatcacttcttctgtgaaatcctgtctgtcctcaagctggcctgtgctgacacaacactcaatcaagttgtcatctttgcagcttgtgtgttcattttagtgggaccactgtgcatggtgctggtctcctacacacgcatcctggtggccatcctgagaatccagtcaggggaaggtcgcagaaaggctttctctacctgttcctcccacctctgtgtggtagggctcttctttggcagtgccattgtcatgtacatggcccccaaatcccagcaccctgaaatgcagcaaaagatcctttccctgttttatagccttttcaatcctatgttgaaccccctgatctactgcctgaggaatgctgaggtcaagggtgccctcaggaggtcactgttgaaggaaagatcaatgtga

SEQ ID NO: 485 - DNA, 933 bp, Mus musculus
  MOR261-4
atgaaagccaaccagacatggatcacagaggtcactctactgggattccaagctgacctagctgtggagtgtttcctcttcgggcttttctctctgttttattcctttacccttctggggaatggaatcatctttggaataatctgcctggaccacagactgcacacacccatgtacttcttcctctctcatctggccattgttgacatgtcctatgcttccaataatgtccccaagatgctggcaaatcttgtgactcaaagaagaaccatctccttcattccatgcctaatgcaaacattcttgtatctggcttttgctcacatagagtgcctgattttagtggtgatgtcctatgataggtttgtggccatctgccaccccctacactacactgtcatcatgagttggagagtgtgtaccattctggctgctgtttcctggatatttagctttcttctggctctggtccatttggtcctcatcctgaggctgcccttctgtgggcctcatgaagtcaatcacttcttctgtgaaatcctgtctgtcctcaagctggcctgtgctgacacaacactcaatcaagttgttatctttgcagcttgtgtgttcatattagtggggcccctgtgcttagtgctggtctcctacacacgcatcctggtggcaatcctgaggatccagtcaggggagggtcgaagaaaggccttttccacctgttcctcccacctctgtgtggtagggctcttctttggcagtgccattgtcatgtacatggcccccaaatcccagcaccctgaactgcagcaaaagatcctttccctgttttacagccttttcaaccctatgctgaaccccctgatctacagcctgaggaatgctgaggtcaagggtgccctcaggaggtcactgttgaaggaaagatcaatgtga

SEQ ID NO: 486 - DNA, 942 bp, Mus musculus
  MOR261-5
atgaaagaaaatcagacaatggtcacagagttcatcctgctgggattctgtcttggcccaagaattcatgtaattctttttgcattgttctctgtctgctacatctttacattgttagggaatgggtttacccttgggctaatctgcctagagcccaggctacactctcctatgtatttcttcctctccaatttggccactgttgacattgcctatgcctgcaacacagtgccacaaacactggtaaacctcttggatgagaccaagcccatctcctttgctggatgcatgatgcagacttacctatttttgacatttgggagcacagaatgtgtcctccttgtggtgatgtcctatgatcgatatgttgccatctgccaccccctacactacactgtcatcatgaactggagagtgtgtaccatcatggctgctgtttcctggatatttagctttctccttgctctggtccatttggtcctcatcctgaggctgcccttctgtgggcctcatgaagtcaatcacttcttctgtgaaatcctgtctgtcctcaagctggcctgtgctgacacaacactcaatcaagttgttatctttgcagcctgtgtgtttgccttagtggggccactgtgcttagtgctggtctcctacacacgcatcctggtgactatcctgaggatccagtcaggggagggacgcagaaaggccttctctacctgttcctcccacctctgtgtggtagggctcttctttggcagtgccattgtcatgtacatagcccccaagtcccagcaccctgaagagctgcagaagatccttttcctgttttacagttttttcaaccccatgctgaaccccctgatctacagcctgaggaatgctgaggtcaagggtgcccttaggaggtcactgtgcaatgaaaaccattcccaattggtgtga

SEQ ID NO: 487 - DNA, 933 bp, Mus musculus
  MOR261-6
atgggaaacaatatgacattaatcacagagttcatcctcctgggatttcctctcagcccgaggatgcagatgctcctctttgccctcttctccctcttctatgccttcaccctgctggggaatggaaccatcgtggggctcatctgcctggactccagactccacactcccatgtacttcttcctgtctcatctggccatcgttgacattgcctatgcctgcaacacagtgccccagatgctggtgaaccttttagatccagtgaagcccatttcctatgctggttgtatgacacagacttttctctttttgacatttgctatcacagaatgccttctcctagtggtgatgtcctatgaccggtatgttgcaatctgtcacccactccgttactctgccatcatgagctggagagtttgcagcaccatggcagtgacttcctggattattggtgttctgctgtctttgatccacctcgtgttacttttacccttacccttctgtgtgtctcagaaagtgaaccactttttctgtgaaattacagctatcctcaaacttgcctgtgcagacacacacctcaatgagacgatggtcctggctggggcagtgtctgtccttgtggggccattctcctcaattgtggtctcttatgcatgtatccttggtgctatcctgaagatccagtcagaagagggtcaaaggaaagccttttccacctgctcctcccacctctgtgtggtcggattgttttatggtaccgccattgtcatgtacgttggacccagacacgggagcccaaaggagcagaagaaatatcttttgctgtttcacagtctttttaaccctatgctcaaccccttgatctatagtctcaggaattctgacgtgaagaatacattgaaaagagtgctgaggacacagagagctttgtga

SEQ ID NO: 488 - DNA, 933 bp, Mus musculus
  MOR261-8
atgatgagaagaaaccacacagtgataagtgagtttgttttccaaggtttctccagctttcaggaatataaatttactctctttatggtatttctgaccttgtacctgctaactctgactggcaatgccattattatgataattatcggtattgatcgtcaccttcatactcccatgtacttctttcttagtatgctttccacttcagagacagtgtacacattggtcattgtaccaaggatgctcgccagccttgtgggttcaagccaatccatttctttggctggctgtgctacccagatgttcttttttatcactttggccatcaacaactgctttctgcttacagcgatgggatatgaccgctatgtagctatctgcaaccccttgaggtactcggttatcatgaacaagagggtgtgtgcccagctagtatggggttcctgcaacattgggctgcttgtggcaataattcaaattgcatctgtattcagggcacctttctgtgacagagaagtagcccactatttctgtgacatccgcccggttatgaaactgtcctgtgctgataccactctgcatgacatagttaactttatcatcagctcactggttattgtggtacccatgggcttggttttcatctcttacattctcatcatctccaccatcctcaagattgcctctgctgagggacggaagaaggcctttgccacttgtgcctcccacctcacggtggtcatcatccactatggctgtgcctccattgcctacctcaagcccaaatcagagaacaccagggatcaggaccagctgatctcagtaacttacactgtgtttactcctctcctaaaccctgtggtgtataccttgagaaacaaagaagtcaaggatgccatttaccgtgctattgggaaaaaacctcttgcctag

SEQ ID NO: 489 - DNA, 951 bp, Mus musculus
  MOR174-6
atggcttatgaagtgatgaaccagacttctgcgaccacattcatcttggttggtttctcagaatatccacagctccaaaaacccctcttcctcctgttcttggccatctactcagtaacattggtggggaacctgggcatacttgtggttataaaggtcaatcccaaacttcacacacccatgtacttttttcttagccacctatcatttttagatatatgctattctagtgtatttacacccaaacttttgcagatcttgatcatggaagataggactgtatctttcaaagcatgcatggtacaatttttctttatttgtacattcgtgattacagaaatgttcatgttagcagtgatggcctatgacaggtttgtggctgtttgtaatcccctactctacacagttgtgatgccttttcaattctgtgctctgctagtagctgggacatatatgattggtggactatgtactgtgatacttctatatacccttttgcaactctcctattgtgaatatggcatcatcaatcactttggctgtgagtactccgctgtcatctctgtgtcttgctctgactcctcctttagccagttgacatccttagtcattgctatagttagtgaatcttctagtgtcctgatcactctagcatcatatgtgttcatagttgtcactattataaagatgccttccaaaggaggactgagaaaagccttctccacctgtacttcccacctgactgccatatcaatcttccatgggatcatactcctcctgtactgtgttcccaactcaaacagctcacagctctttgtcaaagtggccactgctctttatacaatcatgatccctatgttgaacccccttatctatagccttagaaataaagatgtgaaggacacagtcaggagacttatcagctcaaaactgcactctcacttgacataa

SEQ ID NO: 490 - DNA, 960 bp, Mus musculus
  MOR173-1
atgcagaaaccaaaatttctacaaataatgagtgtggagaacagcactgtgaagactgaattctatctcctgggatttagtgatcatccagagctccagagtctcctgtttgctgtgtttttctccatctactccattactctgatggggaatattggcatgatcgtattgatcacagtcagtcctaatttacacattcccatgtactttttcctctgtatgttatccttcatagatgcatgttactcttctgtcattgcccccaaattacttgtggatctgatttctgacaagaaggtgatttcttacaatggctgtgctacacagttgtattttttctgctctctggttgatacagaatctttccttttggctgcaatggcttatgacaggtacattgcaatctgtaaccccctgctttatactgtaattatgtccaagagagtctgtattcagttggcatttggagcattcttgggtggaactatgagttcaataatccatacaactaatactttccagttgtcattctgctccaaagtaattaaccatttcttttgtgatgtctctccactcttctctctgtcctgctttgatacctacacacatgacataatattggtggtgtttgcaagtttggtggaagctctctctcttcttactgttctcctctcctatatgtatattatagtggccatttgtaaaataggttctgcagaaggaaggaagaaagggttctctacttgtgcttctcacctggctgtaatcaccatctatcatggcaccctgattttcatttatttgcgtcctagtacaggacattcaatgaatattgacaaaatgacctctgtgttctatacattgattatacccatgcttaatcccttgatatatagtctcagaaacaaagatgtcaaatttgcctttagaaaaattattagcaaaaaattgtttacttag

SEQ ID NO: 491 - DNA, 951 bp, Mus musculus
  MOR174-7
atgatgcttgatttgggaaacgagagttctgtgaccatgttcatcctttcgggattttcagaatatccacatctccatgcacctctttttctcctattttttatgatatatacagttactctaataggtaacctgggcataattgtggtcagaaaggtcaatcccaagctccacacacccatgtacttttttctcagtcatctttcatttttggatatttgttattccagtgtatttacacctaaactgctagaaatcttgattgtggaggacaggacaatctctttcaaaggatgcatgacacaatttttttttatttgtgcatttgtgattacggaaatgttcatgttagcagtgatggcctatgacaggtttgttgctgtgtgtaaccccttactctacacagtttcaatgtctcccaagctgtgtgcattccttgtagctggaacatatatgtggggtgtactctgttccttgacaattacatactctcttttgcaactatcctactgtggacctaacatcatcaaccactttggctgtgagtactctgccattctgtctttgtcctgttctgaccccaccttcagccaagtggtatgtttaaccatttctatattcaatgagacttgcagcctcctcatcatcctggcctcctatgtcttcatagttgtcacaatcattaagatgccttctaagggtggactccaaaaagctttctctacatgttcttcccacctgactgccatcagcatcttccatgggatcattctccttctttactgtgtacccaattccaaaaactcatggcttgtggtcaaagtggcaactgtgcttttcactgtcatgatccccatgcttaaccctctcatctacagccttaggaacaaagatgtaaaggggacagtcagcagactcatgcacttgaaacttcaagctcattcaacatga

SEQ ID NO: 492 - DNA, 933 bp, Mus musculus
  MOR173-2
atgagtgtggagaacagcactgtgaagactgaattctatctcctgggatttagtgatcatccagagctccagagtctcctatttgctgtgtttttcttcatctactccattactctgatggggaatattggcatgatcttattgatcacagtcagtcctaatttacacattcccatgtactttttcctctgtatgctgtccttcatagatgcatgttactcttctgtcattgcccccaaattacttgaggatctgatttctgacaagaaggtgatttcttacaatggctgtgctacacagttgtattttttctgctctctggttgatacagaatctttccttttggctgccatggcttatgacaggtacattgcaatttgtaatcccctgctttatactgtaattatgtccaaaagagtctgtactcacctggcatttggagcattcttgggtggaactatgagttcaataatccatactactaatactttccaattgtcattctgctccaaagtaattaaccatttcttttgtgatatctctccactcttctctctgtcttgcactgatacctacacacatgacattatactcgtggtgtttgcaagtttggtggaagctgtctctcttcttgctgttctgctctcttatatgtatattatagtggccattcttaaaacaggttctgcagagggaagaaagaaagggttctctacttgtgcttctcacctgacagtagttactatttatcatggtactctgattttcatttatttgcgtcctagtacaggccattcaatggatattgacaaaatgacttctgtgttctatacattgattatacccatgctaaatcctttgatatatagtctcaggaacaaagacgtcaaatttgcgtttaggaaaattatgagcaagaaatcattttcttag

SEQ ID NO: 493 - DNA, 951 bp, Mus musculus
  MOR181-1
atgatcatggaatttacaagtggaaactacaccttggtcaccgaatttatcctgttaggatttccaacacggcccgaactccaaatcatcttgttccttgtgtttctgacgttatatggcatgattttgatagggaatattggcttgatgttgttaattaggacggacccgcaccttcaaactcctatgtactttttcctcagcaacctctcctttgtagacctttgttattcctcagtcattgttcccaacatgcttgtcaatttcctctcagcaaagaaatctatctcttacctcggctgtgcgctgcagttttatttcttctgcacatttgcagacactgaatcttttatcttggctgctatggcctatgatcgctatgttgccatctgcaatcctttgttgtacacagttgcaatgtccaggagcctctgcatatggttaattgtgctgtcatatgttggtggcaatatgagttctttggttcacacatcttttgcctttattctaaaatattgtgacaaaaatatcattaatcatttcttctgtgacctccctcctctgctgaagctttcctgtacggacacatccattaacgagtggctactttccacttatgggagttctgtggagattatctgcttcttcatcatcatcatctcctactttttcatccttctctcagtcttgaagattcgctctacaagtgggagaaagaaaactttctccacgtgtgcctctcacctgacctccgtggccatctatcagggcacacttctcttcatttattctcgtcccagctccctctactcccccaacactgataaaataatctcagtgttctacactattatcatcccagtgctaaacccattgatttacagtttgagaaataaagacgtaaaagatgctgccaagaaagctctaaggtctaaaatacaatccccatga

SEQ ID NO: 494 - DNA, 942 bp, Mus musculus
  MOR173-3
atgagtgtggagaacagcactgtgaagactgaattctatctcctgggattcagtgatcatccagagctccagagtctcctatttgctgtgtttttctccatctactccattactctgatggggaatattggcatgattgtattgatcacagtcagtcctaatttacacattcccatgtactttttcctctggatgctgtccttcatagatgcatgttcctcctctgtcattgcccccaaattacttgtggatttgatttctgacaagaaggtgatttcttacaatggctgtgctacacagttttatttttgctgctctctggttgatacagaatctttcctgttggctgccatggcttatgacaggtacattgcaatctgtaaccccctgctctatactgtaattatgtccaagagggtctgtactcagctggcatttgaagcattcttgggtggaactatgagttcaataatccatacaactaacactttccagttgtcattctgctccaaagaaattaaccatttcttttgtgatatgactccactcttctctctgtcctgctttgatacttacacacatgacattatactggtggttttcgcaagtttggtggaagctgtctgtcttcttgctgttctcctctcctatatgtatattatagtggccattcttaaaacaggttctgcagagggaagaaagaaagggttctctacttgtgcttctcacctggcagtaatcaccatttatcatggcaccctgatttttatttatttgcgtcctagtacaggacattcaatggatattgacaaaatgacctctgtgttctatacattgattatacccatgcttaaccccttgatatacagtctcaggaacaaagatgtcaaattcgcctttagaaaaattattagcaaaaaattgttttttttagttatttaa

SEQ ID NO: 495 - DNA, 951 bp, Mus musculus
  MOR174-8
atggtgccactggaaataaatgtgagtgtggagattaactttgtcctgttgggcttcacagactaccctaaccttcagattccccttttcctaatctttctctttatgtacatcatcactgtagtgggaaaccttggcatgacagtgctcatcaatattgaccacaagttccacactccaatgtacttcttccttagccacctttcctttgttgacttctgctactcaaccatcatcacacccaagctgcttgaaaacttggtcctggctgataaaactatactttacttcagctgcatgttgcagtacttcctgtcctgtgtggctctggtgtctgagtcctacttactagcagttatggcttatgatcgcttcgtggccatctgtaatcccttgctgtatactgtggccatgtcaccgaggctgtgcatcctgcttgtgactgggtcatatatctggagtacctttgaaacattgattctcctttgctatgctctgcagctaaagttttcaagatttaatgtaatcaaccacttcttctgtgaatatactgccctcattgttgtctctagttctgatatacacattcccagcctgctactcttctgttttgcaaccttcaatgaagtgagtacactcctgatcattctcacttcttatgtgttaatttttgtgacggtattaaaaattaaatctgctagtggacgtcgcaaagccttctctacctgtgcctcccacttgactgccatcactatttttcatggaaccatactttccctgtactgtgtaccgaactccaaaaattctaggaatgccgtcaaagtagcctcggtcttttatgcagttgtcaaccccttgcttaaccctcttatctacagcttgagaaacaaggatgtgaaagaggtttttcagaaattagtgagcacttcactgaagttccaacttcactga

SEQ ID NO: 496 - DNA, 942 bp, Mus musculus
  MOR174-9
atgactctgtcagatggaaatcacagtggggctgtgttcaccctcttgggcttctcagattatccagaattgacaatccctctctttttgatatttctcaccatctacagcatcactgtggtaggaaatattggcatgattgtcataatcagaattaatcccaaactgcacatccccatgtacttctttctcagccacctctcttttgtggatttttgttattcctccattgttgctcccaagatgctggtaaatctagttacaatgaacagaggcatatcatttgtaggatgcttagtgcaattcttttttttctgtactttcgtggtaactgaatcttttctattaggagtgatggcttatgacaggtttgtggccatccgcaaccctctactctacacagtggccatgtcccagaggctctgtgccatgctggtattgggatcctatgcttggggggtggtatgctccttgatactgacctgctctgccttgaatctttctttttatggtttcaatatgatcaaccactttttttgtgagttctcctctctcctttcactttcacgctctgacacatctgtcagtcaactgttgcttttcgtttttgccacttttaatgagattagcacactccttatcattctcttgtcttatgtgctcattgttgttactattctgaagatgaagtcagcaagtggacgccgcaaagccttctccacttgtgcttcccatctgacagctataaccatcttccatggaacaatcctattcctatactgtgtacctaactccaagaactccaggcataccgtaaaagtggcctctgtgttttacacagtggtgatccccatgctgaatcccctaatatacagtctgagaaataaggatgtcaaggacacagtaaaaaaaataataggtactaaagtctattcttcttaa

SEQ ID NO: 497 - DNA, 945 bp, Mus musculus
  MOR174-10
atgattctgacagacataaatctaacttctgaggtcacattcgctctcttgggcttctcagattacccagaactgcaggttcccctcttcttgttgtttctggcaatctacagcttcagtgtggtggggaacatagggatgatgataatcatcaagattaaccccaaactgcacacccccatgtacttcttcctcagccacctttcctttgcagatttctgctattcctccatcattgctcccaagatgctggtgaaccttgttgtagaagataggaccatttcatttttaggatgtataatgcagttctttttcttttgcacatttgtagtgactgaactaattctatttgctgtgatggcctatgaccgctttgtggctgtctgtaaccccctgctgtacacagtagtcatgtcacagaggctctgtgcactgctagtgcttggatcatatgcatggggggtggtgtgctccctgacactcacctgttctgccctaaatttatattttcggggtttcaacacaatcaatcacttcttctgtgaactgtcatccctaatagccctctcttgctctgattctcatcttacccagttactgctttttattgttgccaccttcaatgaaataagcacactgctcatcattcttacatcgtatttgttcattgttgtcactgccctgaaaatgcattcatctagtggacaccgaaaagtcttctctacctgtgcttcccatatgacagccatcactatcttccatggaaccatattatttctctactgtgtgcccaactccaagaactccaggcacaccgtcaaagtggcttctttgttttacacagttgtgatccccatgctaaaccccttgatctacagtctgagaaataaagatgtcaaagacacagtcagtaaattaatgaatgtgagaaaattttctcagtga

SEQ ID NO: 498 - DNA, 936 bp, Mus musculus
  MOR177-6
atggatgaaggaaactgctcctccatcactgaatttattctactgggaatcactgatgaccctagcatgaaagtggttctattcatttcatttcttatcatctatctcattattcttgtggcaaatattggaattattgttttgatcagaatagatcctcagcttcacacaccaatgtacttcttcctcagccatctctctttctcagacctctgttattccactgctgttggaccaaagatgctggtagatttactggccaaacacaaatctttatcttttttgggctgtgcattacagtttttctttacctgtgtctttatagatgttgagtgtgtgctgctggcagtgatggcctttgatcggtacaaggccatcagcaatcccctgatgtatgttgtagacatgtccagtagattttgttaccagcttctggctggagtttatgtattagcaatgatagatactctgatgcaaactataataacctttgggttgtgtttctgtaggtcaaatgagattaatcatttcttctgtgatcttccacctattctgttattatcttgctcagatatatatgtcaatgaattagcattgtttgtgttttctgggtttgttgagttgtgcactatttcaggacttcttgtttcttacagttacattattgcatcagtcttgaagatcagctctgatgagggcagattcaaagctttctccacttgtgcctcccacctgactgcagttgcaatttttcagggaactctgctctttatgtatttccggccaagttcttcatactccttagatcaagataaaacaacctcattgttttataccctggtgatacctatgctcaaccctctgatttacagcctgagaaacaaggacgtgaaagaagccctgtacaaactgagaaataaaaggtcatttaaataa

SEQ ID NO: 499 - DNA, 981 bp, Mus musculus
  MOR174-11
atgaattctgtggtatcttctaacagaagccaagtgtggaatgagggaaatcgaagcatggtggcttcttttattttgttggccttttcagaatttccaaacctccaattgcccctgttcctggtattcttgatcatgtacatggttactgtgttggaaaatcttggtatgatttttatcatcaggatgaatcccaaactccacactcctatgtacttttttctcagccacttatcctttgttgatttttgctatacatctgtaattgcaccaaagctgttagacctcttgattgtagaagacaaatcaatctcctttgaaggatgcatggctcaatattttcttgggtgtacatttgtgattatagagatgttcatgttagcagtgatggcctatgacaggtttgtggctgtctgtaaccctctgctctacactgttgctatgtctcatgaactctgctccctcctggttgtaattacttacatatgggctgggatattttcctcaactctcacatatattcttttgcagctctcttactgtggacctaatgtcatcgatcacttttgctgtgagtattcagctctgctttctgtgtcctgctcagacacctccttcagtcaaatggcatgcctggtcatttccatgtttaatgaggcttgttgcctcttgatcatcatcacttcctatgtttttatagttgtcactgtcatcaaaattcccacaaagggggccttccgaaaagcattttccacctgtgcctcccacctgacagctattggtgtctgtcatgggatcgttcttctactatactgtgtgctcaaatccaaaagttcactgtttcttgtgaaagtagccactgtgttccacagcatggtcatccctatgctgaatcccctcatctacagccttagaaataaagatgtcaaggagactgtcagaaagttaatctacctgaaatgtatttttcattcaatataa

SEQ ID NO: 500 - DNA, 957 bp, Mus musculus
  MOR177-7
atgcagtttataaaacaaagaagaatggaggttggaaactgttcagccactgagtttcttctcttgggaattaccaataatcctgtgatcaaggtgattttatttactacttttctaattgtttatctcataattcttattgaaaatcttgggatgatcattttgataagaatgaactcccagcttcacacaccgatgtacttttttctcagccacctctctttctctgatatctgttattctactgcagttggacccaagatgttggtgggccttatattcaagaacaattcaattccatttattgactgtgctgtgcagttctttatcttctgcatttttaccgatgctgagtgtgtgctactggcagtgatggcttttgacaggtataaggccatcagcaaccccttgatgtatgcggtagatatgtccagagtggtatgctatcagctcctggctgtggtttatctggttggaatggtagatgctttgacacatacaacgttgacatttcacttgtgtttctgtcagtccaaagaaatcaaccatttcttctgtgatgttcctcctctcctattactatcttgttcagatacagaggtcaatgaactagttatattcaccctatttgggtttattgagctgagcaccatctcgggagtcctggtctcttactgttacatcatctcatcagttttgaagattcgctctgctgagggcagattcaaagcattctccacctgtacctcccatctaactgttgttgcaattttccagggaacaatgctcttcatgtatttccggccaagttctgcttattccctggatcaagacaaaatgacctcattattctatactcttgtgatccccatgctcaacccgttgatttacagcctcaggaataaggatgttaaagcaagtgtaaaaaggtccctgcaaagtagaatttcattttaa

SEQ ID NO: 501 - DNA, 936 bp, Mus musculus
  MOR177-8
atggataaggggaactgctccacattgacagaatttctccttttgggaattaccagtaaccctgaggtaaaagtgtttttattcactatgtttctagttgtttatcttactaatctgctgacaaatcttggaatgatcattttgatcagaatggatccacagcttcacacaccaatgtacttttttctcagccacctgtctttctctgatctttgctattccactgcagttggtcctaagatgcttgtagacctactgtctaagaatacatctattccttttcttggctgtgctatgcagttcttcactttctgtatttttatagatgctgagtgtgtgctgctggcagtgatggcatttgatcgatataaggccattagtaacccccttttgtatgcagtagacatgtccaggaaagtgtgcttccaattattgactggtgtttattctgtggcattagcagatgctttgatacatacaacattgacattccacttatgtttctgtgggtcgaatgagattaatcatttcttctgtgatattcctccagtgttagtactgtcttgttcagacacacaggtcaatgttttagtcatattcactgtttttggtttcattgaactgagcaccatctcaggagttcttatctcctactgttacatcatctcatcagttctgaagatcagttctgctgctgggaggttaaaagctttctctacctgtacatcacacctgactgctgttgcaatttttcaaggaactatgctcttcatgtatttccggccaagttcttcctactccctagatcaagataaagtgacgtcccttttttatacacttgtgattcccatgctgaaccctctgatttatagtttgaggaataaagatgtgaaagaggcacttcaaagaataagaagtaaaatgtgtttaaaataa

SEQ ID NO: 502 - DNA, 927 bp, Mus musculus
  MOR177-9
atggataggggaaactgctcctctgtggatgaattcattttcttagggattactaataaccctgtcaaaaaagtggccctgttcaccacatttctagttgtttacctcattactcttcttgcgaatcttggaattatcattttaattagaatgaacactcagctccacacacccatgtacttttttctcagcaatctctctttctgtgacttttgctattctacagcgattggcccaaaaatgctggtggatctcttagctgcagagaaatcaattcctttttttggttgtgctgtgcagtttttgatattctgtgtttttgcagattctgagtgtctactgctagcagtaatggcctttgatagataccaggccattagcaatccattgctctacactgtgaacatgtctagcatggtgtgttttatgcttatgactggggtttacctggtggcaacaacagatggtttgatacatacaattttggcattccgtttgtgtttctgtggttctaatgagatcaaccacttcttctgtgatttacctccactttacctgctctcctgctctgaaatacaagtcaatgaacttgccttatttactgtttttggtttcattgaactgagcaccatttcaggagttcttgtctcttactgctatatcattctatcagtcctgaagatccgttctgctgagggaaggttcaaagctttctccacctgcacctctcatctcaccacagttgccattttccagggaactatgcttttcatgtattttcggccaagttcttcttattctctggatcaagataaaatgacttcactgttctatactcttgtgataccaatgttgaaccctctgatttatagcttgaggaataaggatgtgaaagaggctcttcaaagactgaaaatgaaaatgtag

SEQ ID NO: 503 - DNA, 936 bp, Mus musculus
  MOR177-10
atggacaaggaaaactgttcttcattacctgaactccttctcttggaaattaccaataaccctgacatgaaagtgctaatacttactgtgttcttagctattaatcttattgttctcataattaatattggaatgatcatctttatcaagatgaatccacagctccaaacaccaatgtacttctttctcagccacctctttttctctgacctcagctactcctctgcaattgggtccaagatgttgatagacattttcagcaagtacaaaaccatcccattgttgtttgtgcctttcgattctttttttgtctgtatctttatagatgttgagtgtgtgttgccagcagtaatggcctttgatcagtacaaagccataagccaccccgtgatatatgccatagatatgtccaatagagtatgctaccaattcctggctggtgtttaccttgtaggaatgacagatgctttgatccacagaacattaacattttgcttatgtttctgtgagtcacatgagattaatcatttcttctgtgatatccctcctatactgttactgtcttgtttaaatactcagttcaatgagttaatgatattcactatttttggatttattcagttgagcactatttcagaagtccttgtctcctattgctctattatcttatcagtcttgaaaatccattctgccaagggaaggtttaaagctttttccacctgcaccttgcatctgactgctgttgcaatttttcagggaaccttgctttttacatatttccagccaagtacttcttattccctagatcaagacaaaatgacctccttgttttatactctgatgattcccatgctgaacccactgatttacagcctgagatacaaggatgtgaaagagaccttgcaaaacctggaaaataaaaggtggtgtaaatag

SEQ ID NO: 504 - DNA, 948 bp, Mus musculus
  MOR202-18
atgattcagaatatttcagaattgtctgaatttattcttgttgggttaacagatgcaccattcctgcaaattcctttatttatcatctttactctcatttatttgacaacattgtttgggaatcttgggatgattttgctgattctgctggactccagactccacactcccatgtactttttcctcagtaacctctctctggtggactgtgtttatgcctcagctgtcactcccaaggtgatggaagggtttctcacaggaaataagatcatatcctacaatgcatgtgctgcccagatgttcttctttgcagcctttgctactgttgaaagtttcatgctggcctcaatggcctatgaccgtcatgcagcagtgtgcaaacccttgcattactccactactatgacaactacgatatgtgtcctgcttcttgctggatcttatgtcagtggactcttacaatcttccattcatgtttccttcacatttcaactctccttctgccattctaatgtagtcaatcactttttctgtgatatcccaccactattagctctttcttgctccagtattcacacaaatgaaattatactctttatgttggcagcattcaatgttgcttttactctattagttatattgtcctcttacttactaatttttgttgcaattctgagaatgcgctctgctgagagcaggaagaaggccatttccacctgtgcatcccaccttaccactgtttccatcttctatggcacaattatcttcatgtacttacagcccagctccaatcactccatggatactgacaagatggcatctgttttctacaccatggtcattcccatgctgaaccctcttgtatatagcctgagaaataaagaagtcaagaatgcattcaagaaggttgctggaaaagcagtgctttcactgggattagtcaattaa

SEQ ID NO: 505 - DNA, 942 bp, Mus musculus
  MOR202-19
atgcataatatttccgaagtcactgaatttatccttgtgggattaacagatgccccagggctacaggtccctttatttatcatcttcacttttatttacttgaccacattgtttggtaaccttgggatgattgtgttgattctcctggactctagtctccacactcccatgtacttttttcttagtaacctctcactggtggattgtgtttatgcctcagctgtcactcccaaggtaatagaagggtttctcacagaaaagaagatcatatcctacaatgcatgcgctacacagatgttcttcttaataggatttgcaattattgaaggttttctcttagcatcaatggcctatgatcgtcatgcagcagtgtgcaaacccttgtactactctacctccatgacaacaacaatatgtaccctgctcattgtgggttcttacatcagtggactcttacaatcttctatccatgttgccttcactttccacctctccttttgccattccaatgtagtaaatcactttttttgtgacattcccccactactggctctttcttgctctagtgtttatataaatgaaattgtactgtttatcttggcagcactcaatatagctttaactatattggttatcgtgaactcttatgtacttatttttgttgcaatcttgaggatgcgttctactgatggacaaaagaaggccatttccacctgtgcatcccacctcaccactgtttcaatcttctatggcacaattatcttcatgtacttacagcccagctccactcactccatggacactgacaaggtagcatctgtattctataccatgatcattcccatgcttaaccctcttgtctatagcctgaggaacaaagaagtcaagaatgcatttaaaaaggttactagaaaagtgttgttttcactgggattagtctaa

SEQ ID NO: 506 - DNA, 948 bp, Mus musculus
  MOR212-2
atggcagacaatggcaccagattgacagaatttattctcatgggattccagcttcaggcagagctacagttgggtctcttctttacatttttgaccttttatctcatcaccattgctggaaacctgggaatgatcatgctaattcagagtgaccctcggctccaaacacccatgtacttctttctcagccatctgtccttcctggatatttgctactcatctgttattgtgccacagctgctggagatcttggggaataataagatggtcatcacttatgagcactgtgctacccagttcttctttttcaccttttatgctagtactgagtgtttccttttggctgtgatggcttatgaccgctatgtggctgtatgtaaccccctcctttatgccatggccatgacaccacagactcgtctggggctggttgctgcagcatactctggtgcaatggtaaatacggtggtacgaactgggtgtactttttccatttccttttgtaaatccaatcaagttgatttcttattttgtgacctcccacccctgatgaagcttgcctgtagtgagaccaagttacaggaacaagtaatcttcctttttgcttttttggtcatcataactagtgtttcagtgatccttgtatcttacctattcattatctgggctattctgaagattcgtacagcaggagcgaaagccaagaccttctctacctgtgcatctcacatgattgcagtggctcttttttttggaacaattatatttatgtacctgaaaggtaacatgggcaaatccctctgggaagacaagattgtgtctgtattctatactgtggtgattcctatgttgaaccccatgatctatagcctgaggaataaggaagtgaaggaggctctgaagaaagctttcaaaagaattaagtcttctcaagaaagtaagacttaa

SEQ ID NO: 507 - DNA, 948 bp, Mus musculus
  MOR212-3
atggcagacaatggcaccagattgacagaatttattctcataggattccagcttcaggcagagctacagttgtgtctcttcttcatatttttggccttttatctcatcaccattgttggaaacctgggaatgatcatgctaattcagagtgaccctcggctccaaacacccatgtacttctttctcagccatctgtccttcctggatgtttgctactcatctgttattgtgcctcagctgctggagaccttggggagtaataagatggtcatcacttatgagcgctgtgctacacagttcttctttttcacgttgtatgctagtactgagtgtttccttttggctgtgatggcttatgaccgctatgtggctgtatgtaaccccctcctttatgccatggccatgacaccacagactcgtctggggctggttgctgcagcatattctggtgcaatggtaaatactgtggtacgaactgggtgtactttttccatttccttttgtaaatccaatcaagttgatttctttttttgtgacctcccacccctgctgaagctttcctgtagtgagactaagttacgcgaacaggtcatcttcctttttgcttttttggtcatcacaactagtgtttcagtgattcttgtatcttacctattcattatctgggctattctgaagattcgtacagcaggagccaaagccaagaccttctctacctgtgcatctcacatgattgcagtggctctattttttggaacactcatatttatgtacctgaaaggtaacatgggcaaatccctctggcaagacaagattgtgtctgtattctatactgtggtgatccccatgttgaaccccatgatctatagcctgaggaacaaggaagtgaaggaggctctgaagaaagctttcaaaagaattaaggcttctcaagaaagtaagacttaa

SEQ ID NO: 508 - DNA, 966 bp, Mus musculus
  MOR218-2
atgactgtaaaaaatataaccacaatgagcggatttctcctcatgggattctctgacaaccgtgagctgcagatcttgtatgctttgctgttcttgctgacatacctattgggctcagcagggaacttcatcattatcaccatcacaacactagacccacagctccagtctccaatgtattactttctgaagcacctttccattctggacctctcatccctctctgtcacagtcccccagtatgttgacagttcattggcgggaagtggctacatttcatatggacagtgcatgctgcagatttttttctttgcagcttttgcctggggtgaggtagctattctcacagtgatgtcatacgatcggtatgtagctatttgccttccactccactatgaggtcatcatgagtcccagaaagtgtacgtgggcagtgacaagtgtatggctaagcagtgtaattccaggaaccctgtatatagcatccatattctctattagattctgtagggccaaaataattcaccaattattctgtgatgttccccagttgctcaagctgtcctgctctaatgatcaccttgtagtaatagggatggttagtttcatgactgcagtggcctttgcctgcttcgttgggattgtcatctcctatgtccacatattctccacagttctcagaatgccctctgctgaaagcaggtctaaggtcttctctacttgcctgccccacctttttgttgtctcactatttctttctacaggctcctgtgcatatctaaacacaagctcagactctccaactgctttagagttcttgttctctatcttttacacagtactacctccaactctcaaccctgttatttatagtctgagaaatgagacgataaagagtgttgtaaggaagttactgttgagttcaaaattcactgttagaattatttgccctgttgctactgactga

SEQ ID NO: 509 - DNA, 993 bp, Mus musculus
  MOR263-3
atgattagctattctttctttcaggagatgagtgtcaactgctctctgtggcaggaaaataagttgtctgtcaaacactttgcatttgccaagttctctgaggttcctgaagaatgcttcctcctgtttaccctgattctcctcatgttcttagtatcactgacaggaaatgcacttataacccttgccatatgcaccagtccagccctacacacccccatgtacttctttctggccaacttgtctctcctggaaattggctacacttgttctgtcataccgaagatgttgaagaaccttgtaactgaggcccgagggatctctcgggaagggtgtgccacacagatgtttttctttatattctttggtataactgagtgttgcctactggcagctatggcctttgaccgctacatggccatatgctccccactccactatgcaacccgaatgagtcgtgaggtatgtgcccatttggcaatagtttcatggggaatgggatgcatagtagggttgggacagaccaattttattttctccttaaacttctgtggaccctgtgagatagaccacttcttctgtgaccttccacctgtcctggcacttgcctgtggagatacatcccaaaatgaggctgcaatcttcgtgacagtagttctctgcatatctagcccatttttgttgatcatttattcctatgtcagaattttgtttgcagtgctggtgatgccttcacctgaggggcgccataaagctctctccacctgttcctcccatctacttgtagtcacattgttctatggctcagcatctattacctacttgaggcccaagtctagccactcaccaggaatagataaactcttggcccttttctacaccgcggtgacttccatgctgaaccccatcatctatagcttaaggaacaaggaagtgaaggcagcactgagaagaactctgagtctgaagaaacctctggcaataaataggtaa

SEQ ID NO: 510 - DNA, 930 bp, Mus musculus
  MOR256-9
atgatcaacagcagtgtcagtagtgacttcattctggtgggtttctcagatcagcctcagttggaaaggagactcttcattgtagttttaatttcctatcttctcactctggtgggaaatacaatcattattttgatttcttcaatagattctaaactcaaaacccctatgtacttttttctcactcacctctcctttgttgacatctgtttcaccaccagtattgtcccccaactgctatggaacctgaaaggaccagccaagactatcacagctgtgggctgtgcagtgcagctttatgtctctctgactctgggctctactgaatgtattcttctggcagtaatggctttcgatcgctatgctgctgtctgcaaacctctccactatgtagcagtgatgaatccacagctctgccgggctctagcaggaatctcatggctcagtggaataggaaatgctctcatccaaggaacaatcactctttggctcccacgttgtggccacctgtggctccaccacttcttctgtgaagtcccctccatgatcaagcttgcctgtgtggacattcatgccaatgaggtccaactctttgtagcctcattggtcttgctgctcctacccttagccctgatactgacgtcctatggacatatagctaaggcagttataagaatcaagtcatcccaggcttggcgtagagccctgggcacatgtggatcccacttgatggttgtgtctctcttttatgggagcatcacagccatctacatccagccgaacagttcatatgcccacacccatgggaagttcatctctctcttttacactgttatgaccccgacccttaatcccctcatctacacactgaggaataaggaggtgaaaggggctctcggacggctcttcaatagagcctctggagtgtga

SEQ ID NO: 511 - DNA, 966 bp, Mus musculus
  MOR263-4
atgagtatcaactgctctctgtggcaggagaacagcttgtctgtcaaacgctttgcattttccaagttctctgaggtccctggagaatgcttcctcctgtttaccctcatcctcctcatgttcttagtatctctgacaggaaatgaactcatagccattgccatctgcaccagtccagccctacatacccccatgtacttctttctagccaacttgtctcttctggagattggctacacttgctctgtcatacccaaaatgctacagagccttgtaagtgaggcccgagaaatctctcgggagggatgtgccacacagatgtttttcttcacattttttggtataactgagtgctgtctactggcagccatggcctatgaccgctgcatggccatatgctccccactccactatgcaacacgaatgagtcatggggtatgtgcccatttggcaatagtttcatggggaatgggatgtatagtagggttgggacaaaccaattttattttctcgttgaacttctgtggaccctgtgagatagaccacttcttctgtgaccttccacctgtcctggcacttgcctgtggagatacatcccaaaatgaggctgcaatcttcgtggcagcaattctttgcatatctagcccatttttgttgatcatttattcctatgtcagaattctggttgcagtgctggtgatgccttcacctgaggggcgccataaagctctctccacctgttcctcccatctacttgtagtcacactgttttttggctcaggatctattacctacttgaggcccaagtctagccacttaccaggaatggacaaactcttggcccttttctacaccgcggtgacatccatgctgaaccccatcatctatagcttaaggaacaaggaagtgaagacagcactgagaaaaacactgagtctgaagacatctcgggcaataaataggtaa

SEQ ID NO: 512 - DNA, 930 bp, Mus musculus
  MOR136-12
atgaggatggataataagagcaccgtgtctgagttcatcctcctggggctccccattcgaccagagaaccaagttatttactcttccctgattctgaccatgtacctgacaactgtgctggggaacctgctcatcatcctgctcatcaggctggaccctcacctccacacccccatgtacttctttctcagtcacttggccttaacagacatctctttctcatcagtcacagttccaaagatgctggtgaatatgctgacacacagtcagtccatttcatatgatgggtgtgtttcccaggtgtattttttcatagtttttggaagcattgatagctttcttctgacctccatggcatatgacaggtatgtggccttctgtcatcctctgcattataccatcatcatgaatttgagcctctgtgttcttctagtaggaatgttctgggtcttatcttcagccaatgcccttgtgcaaacccttctcttggctcgcctatctcactttagaaacaacaccatcccctactatttctgtgacctctctactttgctgaagctgtccagctcagacaccaccatcaatgatcttatcatccttgttttaggtaatgcagtcattaccctgccattcatatgcattcttgtctcttatggctacattggtgtcaccattctgaaaactccctccatcaagggaatccgcaaagccctgtccacatgtggctctcacctctgtgtggtatccttgtactatggatccatcattggactgtattgtgtcccctcatctaataacaccagtgaaaaaaatgccattgtggctgttatgtacacagttgtcacacctatgctgaatccctttatttatagcctaaggaatcaggatatgaaaggagcactgagaaatatcctcagcagaacacaatga

SEQ ID NO: 513 - DNA, 939 bp, Mus musculus
  MOR136-13
atgaaaagggataaccagagtatggtgtctgaattcatcctcctggggctccccatccggccagaggagcaaggcatgtactatgccctgttcttgaccatgtacctgacaactgtgctggggaacctgctcatcatcctactcatcaggctggactctcacctccacacccccatgtacttcttcctcagccacttggccttcacagacatctctttctcatctgtcactgtacccaagatgctgaggaatatgcatattcatgatccatccattccttatgcagagtgtatagcacagatgtattttttcatattattcactgatctggacaactttctcctcacttcaatggcatatgatcggtatgtggccatctgtcatcccctgcactacaccaccatcatgagagaggagctctgtatcttactcgtagctatatcctggatcctatcctgtgtcagtgccctgtctcacaccctcctcctggcccggctatccttctgtgctgacaacaccatttctcatttcttctgtgaccttgctgccttgctgaagctctcatgctcagacatctccctcaatgaactggtcatttttacagtaggtacaacagtcattactctgccattaatatgtatcttgatctcttatggtcacattgtggccaccattctgaaagtttcatctaacaaagggatctgcaaagcattgtccacatgtggctcccacctctctgtggtgtctctgtattatggtacaattattggagtttattttataccttcatcctttacttctactgacaagggcatagttgcttctgtgatgtacacagtggtcactccattgctgaaccccttcatttatagcatacggaacagagacatgaaggaggctttgaaaaagctcttcaacagagcatcaatctcaacttaa

SEQ ID NO: 514 - DNA, 942 bp, Mus musculus
  MOR136-14
atgagactcaagaaccatagcagtgtgtctgagttccttctcctggggtttcccatcagaccagagcagggaggcatcttcttttctctgttcctggccatgtaccttattacagtgctggggaacctgctcatcatcttgctcatcaggctggactctcatctccacactcccatgtacttctttctcagccatttggccttcacagacatttccttttcatctgtcactgtcccgaagatgttaacaaaagttcagaaccagcccatacccattacctatgaggagtgtgtttcacagacatacttcttcatattttttgctgacttggacagtttccttatcacttcaatggcctatgacaggtacatggccatctgtcatcctctccattacatcactatcatgagtcagagccgttgtgccatgctagtagctgtgtcctgggtcatagcttctgcttgtgctcttttgcacagtctcctcctagaccagctttccttctgtgctgaccacactgtcccacacttcttctgtgacctgggtgccctgcttaagttgtcctgttctgacacatcactcaaccaactggtaatcttcacagcaggtttggccgccattatgcttccgtttctatgcatcctcatctcttatggccgtattgggttcaccatcctccaggttcccacaaccaagggtatctgtaaagccttgtccacttgcgggtcccatctctcagtggtggctctctattatgggtcaattattggtctctattttctgcctccatccaacagtaaaatcaacaacaacatagttgcttcagtaatgtacacagtagtcactcccatgttgaaccctttcatttacagcctgagaaataaagacatgaaaggggctttaaaaaaactcttgagtaagaagacagagttttctaagtga

SEQ ID NO: 515 - DNA, 933 bp, Mus musculus
  MOR138-2
atggaaggagttaaccaaactaggtttgtttctgagttcatactcctgggactgtcccctcggcctgaggaccaaaaaccactgtttatcctcttcctcacaatttacctggttactctaacagggaacctgctcatcattctggccatccgttctgaccctcatctccatactcccatgtattttttcttgagttttctgtctttaactgacatttgtttcactacaactattgtccccaagatgctagtgaattttctgtcagaaaagaagaccatctcctatgcagggtgtctgacacaaatgtattttctctatgctttgggtaacagtgatagctgtcttctggcagtaatggcctttgaccggtatgtagccatctgcaaccccttccactatgtcactatcatgaaccatcatcgatgtgccctactggtgaccttctcttgctcctttccccacttccattcacttttgcacacacttttacttaatcttctgaccttttgtgactcaaatgttattcaccatttcctctgtgacctcagtcctctgttaaaattatcctgctcctccacatttgtcaatgagattgtgatagtgacagaaggagctcttgttttggtgactcccttcctatgcattgctttctcctacatcagaatccttgttacagttctcaagatcccttctgctgctgggaaacgcaaagccttttccacttgtggttctcacttcactgtggtaaccctcttttatggaagcatcttctatgtgtatttacagcctgtgtctacttatactgtcaaagaccatatagcaacaattgtctacacagttttgtcatctatgctcaaccctttcatctacagcttgagaaacaaagacctgaagcagggtctgaggaagctcataagcagaagacacatctaa

SEQ ID NO: 516 - DNA, 948 bp, Mus musculus
  MOR134-1
atgatgacaagaaaccacagtagtgtttctgaatttctcctcctgggcctctcggagcactgggaacaggaacctttactctttggcatctttttggtcatataccttgtcactgtggtgggaaatacactaatcatcctggcaattgtctctgatccacacctccacagtcccatgtatttcttcctggctaacctctctctcactgacatgtgtttatcatctaccacagttcctaggatgctggtaaacatccaaactcagaggcatagcatcccctatgctggatgcctgtctcaaatctatttcttcctgtggttcattggactagatgttttcctcctggcagtgatggcttatgacagacttgtggccatatgctatccccttcactacaccttggtcatgagtcccagatgctgcatcctgctggtgacgacatccctattccttgcccattcatatgctctaacccacatcattctgctgtctcagttatccttctgcatggacaacatcattctccatttcttttgtgaactgcttcccatgttgaagctctcttgttctaacacttatgccaaccagtgtgtgctgctctactggggaggagcattaactgtcttgatccctttgttaatcattgtttcatatgtccgcattgtggccaccattgtgagagtcccatcagcaagtggaaagtggaagaccttctccacctgtgggtcccatctctcagcagtctgcctgttctatgtgtctgctattggggtgtatttcattccatacgctgctgattcagctagcagggataggattgcatcagtgatgtatgctgtggtgacccccatgctgaacccattcatctatagcctgagaaacaaagatatgacaagtgccttgagaaggttcctgaacaaaattttgctgcaacctccacaaagctaa

SEQ ID NO: 517 - DNA, 927 bp, Mus musculus
  MOR138-3
atggacaacagcagctggaccagtgtgtctcactttgttctcttgggtatctctactaacccagttgaacagattcctctcttccttctttttctactcatgtatatcataaacatttctggcaatttttttatcgtcacacttatcatctctacttctcatctccatactccaatgtacatcttcctcagtaacctggccttggcagacatctgcttcacctctaccacagttcccaagatgttacaaaacattttttcctctacaaaggtcatttcctatgtgggctgcttagcccaaacatatttcttcatttgctttgcagccatggaaaatttcctcctggctgtgatggcctatgacaggtacattgccatctgtcaccctctccgttactcctcaatactgactggaatgctgtgtgcacagatggtggctctatgtcatgtcctctcccaccttcatgccctgctgcacaccttcctcatgggcagactgatattttgtgcagataacaggataccccacttcttctgtgacctctatcctctgatgaagatctcctgtagcagcacccaactcaacaccttgatgattcatacagaaggagtgatagtcatcaatggagctctggctttcatcattgcctcctatgccttcatcatctcagcagtcctccggatcccctctgccaatggaaaatggagatcattttctacctgtggttcccacctcactgtggtagccatattctacggcactctcacatgggtctatttcaggcccctttctagttactcagtggtcaagggccgcattgtgacagtcatgtacacagtggtgactcctatgctaaatccctttatctacagcctgaggaatggagatgtaaaagaagccttcaggaagtgggtgagaagagtataa

SEQ ID NO: 518 - DNA, 954 bp, Mus musculus
  MOR159-1
atggccactaaaaacaagacagaagtgactgagtttgtgttgttgggattgtccagtaggccagagatacaaccagttatttttggagttgtccttatcatgtacctgatggcagttttgggcaatactctactaatacttgttgcttgttcagatcccaggcttcagacccccatgtacttccttctcagccagctgtccttgattgacatatctttaacaaccatcactattcctcagatgctagtgcacacactctctgtaaatcggagcatttcctataatcgttgcatgacacaattatttttctttatggcagtgggcagcatggaagtctacttgctgggtgcaatggcatatgaccgctatgttgccatctgtgaccctttaagatactctgccattgtcagctatagcctctgtctgcaaataacattgacctcatggatggtggtcagccttaacagtctcctgtacagtgtgttagtcactcgtttaaccttctgtggcaacaaggtcactcacttcttctgtgacatcactcctctgctgaagctctcttgtactcgaccagtgcttaatgaaatgctaatcttcactgaaggtgtagctgtggtgggtagccccttcttcttcatttggggttcttatgttcgaataggtattgccatggcccacatgcactcctttgctgccctgaagaaagctctgtctacctgtagctcccacattctggttgtgctgctcctttttggcactttggctagaatgtaccttaagccatcatccagctatgacttaggccaggatcgccaggttgccatcttctacacgctcatctcccctatgttaaatccactaatttacagccttaggaaccaagatgttaaaggagcactatggaggctttttaggaaactccatacttcagactggctctcagacaaagaatga

SEQ ID NO: 519 - DNA, 927 bp, Mus musculus
  MOR104-1
atgatcacagagaattggactctagcccaagacttccttctcttaggcttccctggatctcaggtcctccagttttctctttttctcttctttttggtgatgtacctcctcaccattggtggtaatatggcaatcttgctattggttagtacttcacaccagttacagacgcccatgtatttctttctgagcaacctgtcattcttagagatctggtacacaacagctgcagtcccaaaagctctggccattctggtggggaagagtcaatccatatcatttttggggtgtctttttcagatgtacttggttttctcattaggttgcacagaatacttcctcttggcagccatggcttatgaccgctaccttgccatctgttttcctctacactaccagactattatgaacagtctgctctcagcacagctggctcttagctcctggatttgtggtttcctggccatttctgtgccagcagcactcatcagcaccttgtccttctgtggcacccatgctatcaatcatttcttctgcgacattgcaccctggattgccctggcctgtaccagtacacagggagtggaaacagtggcttttgtgattgcatttgtggttatactgagttcatgtctcattactttgatatcttatgcctatatcatcagaaccattctgaggatcccttcaaccagtggtcgcagaaaagctttctccacctgttcctcccacctcactgtggtactcatctggtatggatctacaattttcctccatgttcgaacatccatcaaagatgatttgcaactgactaaagcagttcatgtcctgaatacagtggtgactccagctctaaatcccttcatttatactcttcgtaacaaggaggtcagagaaattctagggaagaaatggaagagaaagtga

SEQ ID NO: 520 - DNA, 927 bp, Mus musculus
  MOR220-2
atgatgaattctaccatggtgactgagttcctcctggaggtttttgctgagacttgggagctcaggatcctactcactgtgctgttcttgttgatgtacctgggcagcttgttcgggaatcttatcatcatcattgttactacagttgaccagaccctgaacacacccatgtacttcttcctcaggaatctgtctattttagacatggggtttgtatctgttactgtgcccaatgcttgtatcaactctctcactgaccacagaaatatttctgtggctgggtgtgcagcacaaatctttttggtcttcttttgttcatgtgtagagattcaattccttaccacgatggcccaagaccgctatgtggccatctgtaaacctctcatgtatcctgtgattatgacccaccaattctgtgttcagatgacactggcttccctacttacctctcttatccttgcaagtgtgcacacttccaaaactttccagttgtccttctgtcactctaatatagtccctcagttcttctgtgatatcccctctttgctgaggctttcttgctctgacacctttaacaacaaactattacttcttctgtctgccattggtctcagtggtagctgctttacattcattgctgtatcatatgttcgcatattatcaacagtgttgaaggttcctgtcaaaggagaaagagggaaggccttttccacctgtgtccctcacattattgtggtgtctgtgtttcttagttctggggcgtatgtatatctaaaacctccagcaatcccagaaataattgaggatatgactctttctgtattttataccattgttccaccattcttaaaccctattatctatagtcttagaaacaaacagataaaggaggctgtgaagaaagtaatattcagatttctttcatag

SEQ ID NO: 521 - DNA, 960 bp, Mus musculus
  MOR104-2
atggatgtaaaaaaccaaacagcagtgaccgagtttatttttctagggtttccaggctcctcttcactgcagctcccattgtttatgatgtttctaactgtgtatttgctgtctctcatgggaaacaccctcattattttccttattcttgtggattccacattacagacacccatgtatattttcttaggaaacctatcgttcctggagatctggtacactacagccacggtgcctaagttgctggctacatgtgtcacaaaggttgtcaccattcctgttgcaggctgcatcactcagtactatttcttcttctccctgggagccactgagtgcatcttgctagcagttatggcttatgacaggcatgtggctgtatgccgccctctgcattactcacttcttatgagtgttcacatttgcctgaggttttcagctgcatcatgggttggaggcttccttgcccctctgctacctaccatacttatctctcagctaaacttctgtggcccgcagaaaatcaaccattttttttgtgactctgaccccatctttaaactctcctgttcagacacattcttggtggaggccttgggttacacctgcagttctgtggtgattctcagttctttccttctcacaatgagctcctatggcaacatcgtggtcacaataatcaggctgtcttcccgggaagcaaggaagaaaacattctcaacttgtgcctcccatctcacagtagtgaccatctactatggcaccataatctttgcctatgtccgacctccagctaagtacaacttcacaattggcaaagtagtctcagtgttctactgcgtgatcacccctttagttaaccctctcatatataccctgagaaacaaagatgtgatgaaagctttccagaaatttctatcccaaaagaagtttttaatgggcaaaaacatgcatggactttga

SEQ ID NO: 522 - DNA, 930 bp, Mus musculus
  MOR220-3
atgatgaattctaccatggtgactgagttcctcctggaggtttttgctgagacttgggagctcagggtcctactcagtgtgctgttcctgctggtgtacctgggcagcctgttcgggaatcttaccatcatcattgttactacagttgaccagaccctgaacacacccatgtacttcttcctcaggaatctgtccatcttagacatgtgctatgtttctattactgtgcccaatgcctgtataaactctctcactgaccacaggaacatttctgtgactgggtgtgcagcacagatctttttgttcttcttttgtgcatgtgtagaggttcagtttctcaccatcatggctcaggaccgctatgtggccatatgcaagcctctcctctaccctatgattatgaaccatcaattctgtgttcagatgacactggcttccctacttacctcacttatcctttcaggtatgaacactttcaaaactttccagctatccttttgtcactcaaatgtagttcctcagttcttctgtgagctgcctgctttgctgaggcttacttgctctgacacctttaacaacaaaatcatacttcttctgactgccattggccttagtggtacctgctttactttcattgccatatcatatgttcgcatattatcaactgtcttgaaagttcctgtcaaaggagaaagaggaaaagccttttctacctgtgtccctcacatcattgtagcatatctgtttttttgttctggtgcctatgcatatctaagaccttcagcaatctcagaagtagttgaggatatgactctttctgtattttatacaactgttcctccattcttaaaccctattatctatagccttagaaacaaaccaaataaagaaggctgtgaagaaagtaatattcacatttttcatagttga

SEQ ID NO: 523 - DNA, 942 bp, Mus musculus
  MOR219-1
atgcccaatatcactgccttcactggatttctcctgacggcgttctttgacagccaggagttacagactttatggggagtgttcttccttgggatatacctggaagccctaatgagtaacctcatcatcatcactcttatcacccttgacctacagctccaaacacccatgtactttttcctgaaaaatttgtccctgttggatgtcttttttgtttctgttccaatcccaaagttcgttgttaatagcctaattcataataattctatttccgttctggcttgtgccttccaggtatttttaatgacttctttttcatcaggagaagtatttgtcctgactgccatgtcctatgaccgctatgttgccatttgttttcccctgaactatggtgccatcatgaataaccacacctgtgtgctgatgatgggtgtttcctgggctactggaatgctttttggagccatatacacagctggcacattttccatgcctttctgtggctccaatgtgataccacaatttttctgtgatgttccctcattgctaaggatctcctgctctgaaacacttgtggccatttactcatgtcttggaattggtgtttgtctgggtatgtcttgcttcatctgtgttgtgatttcttatttttacattttctccactgtgctgaagattcctaccaccaaaggccagtctaaagcgtttgccacctgtattccccacctaactgttttcactgttttccttgttactgcttgctttgtctatttgaagccattcacaaatacactatcaatttcagagaggctattttctgtgctatatactgtgttgcctccagcactaaatcctttgatatacagcctgaggaacactgatgtgaaaagtgctctcaggaggttgcagcaaaatctttgcttgagaaggttacttatttaa

SEQ ID NO: 524 - DNA, 960 bp, Mus musculus
  MOR219-2
atgcccaatgtcactgcagtaactggattcatacttatgggtttctctgatatccatgagctacagattctatgtggagtgttatttttagtactatacctgggaattttaatgagtaacctgctcatcatcattctcatcactgtggatctgaagctccaaacacccatgtacttcttcttgaagaatttatcccttttggatgtctttcttgtgtctgttacaattccaaatttctttgtcaatagccttatgcacaaaaattccatttccatacttggatgtgcatttcaggtatttttcatggctctccttggatcaggagaagtatttgttcttactacaatgtcatatgatcgctatgttgccatttgcagtcccctacattatgaggtcattatgaatagtgttacctgtgtagtgatgatgagcgtttcctggggcactggattattctttggagtcatgtacacagctggcacattttccatgactttctgtggctctaatgtgatcccacagattttctgtgatgttccatcactcttaaggatttcctgctctggatcactcatgatcatttatataagtcttggaattggtgtttgtctaggcatgtcttgttttatctgtgttgggatttcctacatttacattttctccactgtgttgaagattcctaccactaaaggtcagtccaaagcatttggcacctgtatcccccatctcactgttttcagtgttttcattgctactgcttgctttgtctatctgaagccaccctcaaattcagcatcacttacagatagactgttttctgtgttgtatactgtactaccaccagcactcaatcctgtaatctacagcttaagaaacaatgatgttgatagtgctctgaagagactgcttcaaaatctctactcaagagacttccttcatgtaatacatcaaaatgtttga

SEQ ID NO: 525 - DNA, 939 bp, Mus musculus
  MOR104-3
atgagaaatggcactgcaatcactgagttcatcctcctcggtttccctggcatccaaggctcagaagcccttctcttcatagtgatctttctcatctacatattaaccctttcgggcaatggactcattattgtcattgtctgggttgagcccaggcttcaaactccaatgtactttttcctttgcaacttagccttcctagagatctggtataccaccactgtcatcccaaaattgctagaaacctttgtagtatcaaaaacagtcatctgcactgcctgctgcctgctgcaggccttcttccacttcttcctgggtaccactgagttcttgattctgggcagcatgtcttttgaccgctacctggccatctgtaagcccctccgttacccaaccattatgaccagcaatctctgcctacagctggccctcagctcctggctagcaggcttcaccattgtcttttgtcagacaatgctgattgtacagttgccattctgtggcaacaatgtcatcaaccatttctactgtgacgtgggtcccatcttgaaagctgcctgtgcggacaccagcatattggaactactgggtctcctggcaacgattctcgtgatcccagggtcactcctcttcaccatcatttcttacatctacatcttatccaccatcctacggatcccttcagccactggccgccaaaaggctttttctacttgtgcctctcacctgacagtagtctctctgctctacggagctgtcttgtttatgtacctgagacccacagcacactcctcctttaagattaataaggtggtgtctgtactaaacactatcctcacaccccttctaaatccctttatttacaccattagaaacaaagaggtgaagggggccctaagaaaggccattacttgtgcaaacaggcatcatgcaaagtga

SEQ ID NO: 526 - DNA, 924 bp, Mus musculus
  MOR171-13
atggagtctggaaacctttcgatgataatcgaatttatcttgactggattcccaaccaaaccagagttgcagctgcccctgttcctcctcttccttggcatctacctggtcacagtgttggggaacctgggcatgatcatcctgatcgtgctcagctctggcctacacacacccatgtacttcttcctcagcagtctgtccttcattgacctctgccattccactgtcattacccctaaaatgctgttgaactttttgttagaggagaacatcatctcctaccctgaatgcatgacccagctctactttttctctctttttgcaattgcagagtgtcacatgttggctgtaatggcatatgaccgctatgttgccatctgtaaccctttgctttacaaggttgtcatgtctcatcatgtctgcttctggttcacagtgggagtttacactttgggtattcttggatcatcagttcacacaggacttatgttaaaattgtttttttgtaagaccaataaaattaaccactatttctgcgatctttttccactcttggagctatcatgctccagtatatacatcaatgaactcttggttcttttcttgagtgcactgaatatcttgacacctgcattgaccatccttatgtcctacatcttaatcattgtcagcatcctccgtattcgctccactgagggcaggtccaaagccttcagcacctgcagttcccatatctctgctgttgctctcttctatggttctgctgctttcacatacttacagccatcttcagtaagttcaatgaaccaagggaaagtgtcctctgtgttttacactactgttgttcccatgctgaacccactcatctacagtctgagaaataaggatgtcaaatcttccataaagaaaattcttaacagatga

SEQ ID NO: 527 - DNA, 924 bp, Mus musculus
  MOR171-14
atggggactggaaaccattcaatggtaactgaatttatcttggctggattctcaaccaaaccagagctgcacctgcccctcttcctcctcttccttggaatctaccttctcacagtactggggaacctgggcatgatcatcctgattctactcagctcacacctgcacacccctatgtacttctttctcagcagtctgtccttcattgacctctgccattccactgtcattacccccaaaatgctggtaaactttgtcacagagaagaacataatctcctaccctgagtgcatgactcagctctactgcttccttgttttcgcaattgcagagtgtcacatgttggctgtgatggcatatgaccgctatgttgccatctgtaaccctttactttacaatgttgtcatgtctcatcatctctgcttctggctcaccgtgggagtttacagtttgggtattgttggatcatcagttcacacaggctttatgttaaaattaaatttttgcaagattaatgtgattaaccattatttttgtgatctttttcctctcttggagctatcatgctctagtatatacatcaatgaactcttggttcttttcttgagtgcattgaatatcctgacacctgcattgaccatccttatgtcctacatcttcatcattgtcagcatcctccgtattcgctccactgagggcaggtccaaagcctttagcacctgcagttcccacatctctgctgttgccatcttctatggttctgctgcatttatgtacttacagccatcatcagtaagttcgatggaccaagggaaagtgtcctctgtgttttatactactgttgttcccatgctgaacccattgatctacagcctgagaaataaggatgtcaaatctgctgtaaagaaaattctaaacagatga

SEQ ID NO: 528 - DNA, 945 bp, Mus musculus
  MOR171-15
atgttccaaggaaatctttccggagtaactgagttcaatcttgctggtttaacagacaaaccagggctgcagctgcccctcttcctcctgttcctaggaatctatgtggtcacagtggtggggaatctcagcatgatcaccctgatactattcagttctcaactacacacacccatgtattattttctcagcagtctgtccttcattgacctctgccagtccattgtcattattcccaaaatgttggtgaactttgtgacagtgcagaacatcatctcctaccctgaatgtatgacacagttttgcatttttgctacttttactattgcagagtgtcacatgttagctgtaatggcatatgaccgctatgttgccatttgtaagcccttgctttacaatgctgtaatgtcctatcaagtttgttcctggatgatatttggagtatatattatggcttttgttggtgccacaactcaaacagtcttcatgttaaaagtgcatttttgtaaggccaatgtaataaatcattacttctgtgatctttccccactcctggaactctcttgttctgatacttttattaatgaagtattagctttgtgcttcagtgttttcaatatctttattccaactctgacaattctaagctcttacatcttcatcatagccagcatcctccggattaaatccactgaaggcaggtccaaagccttcagcacttgcagctcacacatatcagcagttgctatattctttggatcccttgcattcatgtacctgcagccatcatcaatcaactccatggaccaaaggaaagtgtcctctgtattttataccattgtcgtgcccatgctgaatcctttgatctacagcctgaggaataaggatgtcaaagttgctctaaataagttccttgaaagaattttttcttgtgaacaaaactga

SEQ ID NO: 529 - DNA, 936 bp, Mus musculus
  MOR171-16
atgttaaaaggaaatctttctgaagtgactgagttcatcctcgctgggttaacaaacaaaccagagctgcagctgcccctcttcctcctctttctagcaatctatgtggtcacagtggtggggaatctgggtatgattatcctgatattactcagttctcaccttcacacacccatgtattatttcctcagcagtctgtctttcattgacctctgccagtccactgtcattattcccaaaatgttggtgaactttgtgacagtgaagaacatcatctcctatcctgaatgtatgactcagctctacttttttgttacttttgctattgcagagtgtcacatgttagctgtaatggcatatgatcgctatgttgcaatctgtaaccccttgctttacaatgctgtaatgtcctttcaagtctgttcctcaatgatatttggggtatatagtatagctttaattggtgccacaactcacacagtctgcatgttaagagtgaatttctgtaaggcaaatgtgataaatcattacttctgtgatctttttccactcctggaactcccctgttctgatacttttattaatgaagtagtagttttatgtttcagtgtttttaacatctttattcccactctgactattttaacctcttacatcttcatcatagccagcatcctccggattaaatccactgaaggcaggtccaaagccttcagcacctgcagctcacacatatcagctgttgctatcttcttcggttcccttgcattcatgtacttgcagccatcatcagtcagctccatggaccaagggaaagtgtcctctgtattttataccattgttgtgcccatgctgaatcccttgatctacagcctgagaaataaggatgtcaaagttgctctaaataagttctttgaaagaaagtttttcttatga

SEQ ID NO: 530 - DNA, 945 bp, Mus musculus
  MOR171-17
atgttccaaggaaatctttccggagtaactgagttcaatcttgctggtttaacagacaaaccagggctgcaggtgcccctcttcctcctgttcctaggaatctatgtggtaacagtggtggggaatctcagcatgatcaccctgatactattcagttctcaactacacacacccatgtattattttctcagtagtctgtccttcattgatctctgccagtccaatgtcattattcccaaaatgttggtgaactttttggctgtgaagaacatcatctcctaccctgaatgcctgacacagctatgcttttttgctacttttggtattgcagaatgtcagatgttggctgtaatggcatatgaccgctatgttgccatttgtaagcccttgctttacaatgctgtaatgtcatttcaagtctgttcctggatgatatttggtgtattcagtatggctttgattggtgccacaactcaaacagtctgcatgttaagagtggatttctgtaacgccaatgtaataaatcattacttctgtgatctttccccactcctgaaactctcttgttctgatacttttattaatgaagtattagctttgtgcttcagtgttttcaatatctttattccaactctgacaattctaagctcttacatcttcatcatagccagcatcctccagattaaatccactgaaggcaggtccaaagccttcagcacctgcagctcacacatatcagctgttgctatcttctttggttcccttgcattcatgtacttgcagccatcatcagtcagctccatggaccaagggaaagtgtcctctgtattttataccattgttgtgcccatgctgaatcctttgatttatagcctgaggaataaggatgtaaaagttgctctaaataagttccttgaaagaattttttcttgtaaacaaaactga

SEQ ID NO: 531 - DNA, 939 bp, Mus musculus
  MOR171-18
atggcatacagcaatcagtccagagtgactgagttcatcatcgctgggttaaccaacaaaccagagctgcagctgcccctcttcctcctcttccttggaatctacctgttcacagtgctggggaacctgggcatgatcatcctgatcctgctcagctcgcacctgcacacccccatgtacttcttcctcagcagcctgtccttcattgacctctgctactccacaataatcacccctaaaatgctggtgaactttgtgacaacaaaaaatgtcatctcctatcaggaatgtatgactcagctctatttcttcattgcttttgttatatctgagtgtcacatgttggctgcaatggcatatgaccgctatgtcgccatttgtaatcccttgctttacaatgtcaccatgtcttaccaagtctgttcctggatggtaggtggggtatatggcatgggcttcattggtgcagcaattcatactttctgcatgctaagagtggttttctgtaaggataatataataaaccattacttctgtgatcttttcccattgatggagcttgcctgctccagtacttatgtcaatgaggtagtactcctgtctctcagtgctttcaatatctttattccaacattgactatcctgggttcttacatcttcatcattattagtatcctccgtatcaaatccactgagggcagattcaaagccttcagcacatgtagctcccacttctctgccgtttctgtcttctttggttccctggcattcatgtatctgcagcccttctctgtcagctccaaagacaaaggcaaagtgtcctctgtgttttacactactattgtgcccatgctgaaccctatgatctacagcctgaggaatagggatgttaaacttgctctaaataagttatttcaaaaaaagaagtttcatgtataa

SEQ ID NO: 532 - DNA, 945 bp, Mus musculus
  MOR239-6
atgaatccagcaaaccattcccaggtggccacgttcttcctcctgggtctctctcaggtatgggagcttcggttcctattcttcactgtcttctcagcagtgtatcttttgactgtcactggcaatcttcttattgtggccatagtgacctctgacccgcgtttgcacacaactatgtatttcctcttaggcaacctttcattcttggacttctgctactcgtccatcactgcccccaggatgctggttgatttgctctcacacagccccaccatttcctttggtgcctgcttaactcagctcttctttttccacttcattggaggcatcaagatattcctgctgactgtcatggcgtatgaccgttacatagccatttctcagcccctacgctacacactaattatgaatcagacagtctgtgggatcttcatggcagcctcgtgggtgggtggttttatccactccattgtacaggttggactgactatccatctgccattttgtggtcccgacaaactggacaacttttattgtgatgttccacagctgatcaaattggcctgtaccgatacctttgtcttagagcttctgatggtgtctaacaatggcttggtcactctcatgtgttttctggtgctgctgggctcctacacagccctgcttgtgatgctccgaagtcactcaaaagagggtcgcagcaaggccctgtctacctgtgcctctcacattactgtggtgactataatttttgtaccttgcatttacatctatgcaagaccttttaggacattccccatggacaaggcagtttctgtgctatacacaatggtcacccccatgctgaatcctgccatttataccctgagaaataaagaagtgattgtagccatgaaaaagctatggaggaggaagaaggattttcttggttcctcagatcattga

SEQ ID NO: 533 - DNA, 939 bp, Mus musculus
  MOR262-9
atgggaaattactctgcagtgacagaattctttctcgtgggactttcccagtatccagaactccagcttttcctatttgtgctctgcctcatcatgtacttgataatcctcctgggaaacagtctgctcattatcattagtatcctggattctcggctccacacccccatgtacttttttcttgggaatctctcttttttggacatctgttacacatcctcatccattcctcaaatgctcatcatgtttatgtcagcgagaaaatccatctccttccttggttgtgctctacaaatggttatctcccttggcttgggttctacagagtgtgtcctcctggctgtgatggcctatgataggtatgcagccatttgcaatccactgaggtaccctataatcatgaacaaagtattatatgtgcacatggctgtgtggtcctgggtcataggctgtctgaactctctagtgcaaacagtcttgacaatggtgttacctttctgtggcaacaatgtcattgatcaccttacctgtgagatcctggctcttcttaaacttgtatgctcagatatcaccatgaatgtgcttatcatgacagtggccagtattgttttgttgatgatccctctgatgttaatttttgtgtcctatatttttatcctttcttccattctgagaattaattctgcggaaggaaggaagaaagccttttcaacctgttcagcccacctaaccgtggtcatcttattctatggttcagccctttttatgtacatgaaacccaagtcaaagtacaccaaagcatctgatgaaatcattggactgtcttatggagttgtgacgccaatgttgaatcccatcatctacagcttgaggaataaggaggtcaaagaagccgtgaagaaaattttgagcaaacgtttgtacctgcggaaaatctga

SEQ ID NO: 534 - DNA, 942 bp, Mus musculus
  MOR132-1
atggaaccacaaaaccacaccagtgcatctgaattcatcctcttgggactttcagaaaagccagatcatgaccctgtcctcttttctctgttcctctgcatgtacatgatcacagtggtggggaacttgttgatcattcttgccatcagctttgactctcacctccatacccctatgtatttcttcctggccaatctctccttggttgatttctgtctggctaccaacactgtccccaagatgctggtgaatattcaaactaggaacaaatctatctcttatccttgttgtctgacccagatgtactttttccatttttttggcatcatggacagtgtcttaatagctgtgatggcttacgaccggtttgtggccatttgtcacccattacattattctactatcatgagtccacggctctgtggcctgctggttggtgtcccatgggtatattcctgcttcatctccctcactcacatcctcctcatggcccgtctggtattctgtggcaaaaatgagctcccccactacttctgtgacctcaccccacttctccgactttcctgcacagacacaacagtaaacaagatctttgtgctcattgtggcaggaatggtgatagccacaccttttgtctgcatcctggcctcctatgctcgaatcatcgtggccatcatgaaggtcccctctgcaggtggcagaaagaaagccttttctacctgtagctcccacctctctgtagtagcccttttctatggtaccaccattggagtctatctgtgtccttcctctgtccgcacagctgtgaaggagaaggcttctgcagtaatgtacacagcagtcacccccatgctgaacccctttatctatagcctgaggaacagagacctgaagggagccctaaagaagatcattaaccgaaagatcagcacatcctcctga

SEQ ID NO: 535 - DNA, 939 bp, Mus musculus
  MOR149-1
atggaatctaaaaaccaaacagatgtttcagaattctttcttatgggaataacagatgatatagcactgaagcccctcatcttcagcatgttcacctccatgtacttgatcaccatcttgggaaatctgctcatcattctaactgtctgttctgactcccatctccaaacacccatgtacatatttctctctaatctatcctttaatgatatctgcttaagcacaaccataattccaaagacattggtgaacattcatgcacaggatcagagcatcacatatactagctgtcttacacaaatctgctttaccttgcttttttgtagttttgaaagttgtcttctttcagtaatggcatatgaccgctatgttgccatatgtcatcccctgaactacacaacgatcatgaatcctcaaacctgtggtctgctaattctattatctctaatcataagtcttgtgaatagtgggttgcttggactgatggtgttgcggttgtccttctgcacaaacttagaaatccccctatttttctgtgaacttgctcaagtcatcaagctagcttgttctgacaccctagtaaattatattctgatatatcttgcaacaatcatacttaatggcattccaatctctggaataattttctcttatactcaaattgcctcatctgttttgagaatgtcttcagtgaaaggaaagtataaagcaatttctacctgtgggtctcatctttcagtggtttcattattctatggtacagcattgggtgtttatattagctcttcattcactacctcagtcacaaatactgcatttgcttatgtgatgtgtacattggtcccacaaatgttgaatccctttatatatagcttgaggaacagagacatggaggtagccttgaggaagcacatcaatagggcaatgtgtttactctga

SEQ ID NO: 536 - DNA, 945 bp, Mus musculus
  MOR260-2
atgggaagagaaaaccagagctttgtagatgaatttgtgttgctgggcctttcgcaagatgcacagactcagatcctcctgttcgtccttttcttcatcgtttacattctgactgtacttggaaacctgctcatcattgtcctcatcctcatggattctcgactccacacccccatgtacttttttcttagaaatctttcttttgcagatctctgtttctcaaatagcattgttcctcaagtgctgtcccacttcctggtaaaaaggaaaactatctccttttggggctgtgtgacacaggtaattgtctcccttcagattgggtgtacagagtgtgcactgctggcggtgatgtcctatgaccgctatgtggctgtgtgcaaaccactgcactactccaccatcatgacccaacaactatgcctgcagttggccctagggtcctgggccagtgggctcctagtatgtttggtagatattgctgttgctttccatcttccctatcgagggcagaacatagtcagccattacttttgtgaacttcctgcacttctgaaggtggcttcagcagatacttacagcacagaaatggccatctttgcaatgggtgtggtaatcctcctagcacctgtctccctcatcctcatctcctactggaacatcatatccactgtgatccagatgcagtctggagaggggagactcaaggtgttctcaacctgtggatctcacctcattgttgttgtcctcttctatgggtctgcaatatttaactatatgcagccaaacaccaaaactaggaagaaacaggataagataatgtctgtgttctatacagtggtgactccaatgctaaaccccataatttatagtcttcggaacaaggatgtcaaaagtgccttcaggaaactagctgcaagagtggtattctttcgaaagcaatga

SEQ ID NO: 537 - DNA, 966 bp, Mus musculus
  MOR263-5
atgaaatcatgcaaaagaatgacctggggaaactggacaactgtcagggaatttatcctcatgagcttctcaagcttgtcctatgaagtacaggctctgctatttctcctgtttttgatcatttacctagtcacactcatgggcaatgtcctcatcatcctggttactacagctgactctgctctgcaaagtcctatgtacttcttcctcagaaacttatccttcctggaaataggcttcaacttggtcattgtgcccaagatgttgagtactctgatactccaggacaaaaccatctccttccttggctgtgctactcagatgtatttcttctttttctttggagctgctgagtgctgcctcctggccacaatggcatatgaccgctacatggcgatctgtgatcccttgcactacccaataatcatgagccgaagatcctgtgcccagctagcagctgcctcttggttctccgggttcccagtagccactgtgcaaaccacatggattttcagtttccctttttgtggcccaaacatggtgaaccacttcttctgtgacagcccacctgtcatagccctagtctgtgctgatacatccctatttgaactggaggctctaacagccactgtcctattcatcctctttcctttcttgttgattctgggttcctatgtccgcatcctctctaccatctttaggatgccttcagctgaagggaaacgcaaagccttttccacttgctcctcccacctcctcgttgtctccctcttctacagcactgccatcctcacatacttccggccacgctcaaacacctcccctgagaacaagaaaatgttgtcactctcctacacagttatcactcccatgttgaaccccatcatctacagcttaaggaataatgaggtgaaggctgcattgaggcgaatcattcacagaactctgggccctcagaaactatga

SEQ ID NO: 538 - DNA, 936 bp, Mus musculus
  MOR283-3
atggagctctggaactcgactgtgggaagtggtttcatcttggtggggattctggatggcagtggctctcctgaactgctctgtgctgcaattacagccctgtacttcttagccctgaccagcaatgggctgctgcttctagtcatcaccatggatgcccggctccatgtgcccatgtatcttctacttggacagctttctctcatggacctcctcctcacatcagttatcactcccaaggctgttgtggattttctcctcaaagacaataccatatcctttggaggttgtgcccttcagatgtttctagagctggcactgggtagtgcagaggaccttcttctggcctttatggcctatgacaggtatgtagccatttgtcaacctctgaactacacaatcttaatgagtcacaaagtctgctggctcatgatagccacctcatggatcttggcatccctcagtgctctaggatatagcatctacaccatgcagtattccttctgcaaaaatcgtcagatcaatcatctgttctgtgagatccccccattgctgaagctggcctgtgcagacacctccacatatgaactcatggtttatttgatgggggttattgtgctaattcttcctcttactgccatcctggcctcctactcactaattctgttcactgtgctcaatatgccctcaaatgagggcaggaagaaagcccttgtcatctgctcttcccatctgactgtagttgggatgtggtatgggggtgcttccttcatgtatgttctacccagtccctttcacagccccaaacaagacaatatcagctcagttttctacacgattgtcactccggctctgaatccccttatctacagcctgaggaataaagaggtcactggagctttgaagagagtcctgggaaaacgattgtcagcatag

SEQ ID NO: 539 - DNA, 933 bp, Mus musculus
  MOR260-3
atgggcaaattaaaccacacttatctgacggagttcatcttgctgggcctctcttcagatcatcagactcagatcctgctgtttgtggtatttctcatcatctacctgatcactgtgtttgggaacctgctcatcatactcctcattcatgttgactcccgacttcatacaccaatgtacttctttctaaaaatcctgtcattcaatgatctctgtttctctacaacaattgttccaaagatgctagtccactttctaggtgtcagaaagaccatttcatttgctgggtgctcagtgcaaatgttttctttcctcataatggggtgtacagaaagctctcttctggcagtcatgtcatatgaccgctacatagctgtctgcaaacccctgcactactccaccatcatgacacataaggtttgtgttctgctagttgtaggatcctggactagtggaatatttgtgtctgtagtagatacctcatttactttatgcttgacgtaccggggaccaaatataatcaatcattacttttgtgagcctcctgcactcttaaagctggcttcagaagaaacctacacagctgaaatggtcatatttgcaatgggtataataattctcttaggtcctgtctctcttatccttttctcctattggaatattatctccactgtggttcaaatacaatcaggtgaggggaggctcaaggttttctctacctgcagttcccattttattgttgttatcttcttctatggctcaacaatatttacctacatgcagccaaactcaaagaaaatgaatgaaaaggataaggtaatctcggtattctactcaatagtaacatccatgatgaacccattcatttatagcctaaggaacaaagatgtgaaaggggcattaaagaaagtacttaaaagagagataagataa

SEQ ID NO: 540 - DNA, 951 bp, Mus musculus
  MOR283-4
atggagctttggaactctaccttgggaagtggcttcatcttggttggaatcctggatgacagtggctctccagaaatactctgtgccacattcacagccctgtacatgttggctatgatcagcaatgggatactgctcctggtcatcaccatggatgcccggctccatgtgcccatgtatcttctgctttggcagctttctcttatggatctactcctcacatcagtcatcactcctaaggctgttatagattttctgcttaaagacaacactatctcctttgggggctgtgcccttcaaatgttcctggaactgacacttggtggtgcagaagaccttcttctggcctttatggcctatggcagatatgtggctatttgtcaccctctgaactatatgactttcatgaaacctaggatctgctggcttggagtgttcatatcatggaccctggcatctctgagtgcagtaggatataccatctacaccatgcaataccctttttgcaagtctaggaagatcagacacctgttctgtgagatccctccattgctgaagctggcctgtgcagacacctccaaatatgagctcatggtttatgtgatgggtgtgatcttcttacttctccctcttgctgccatcctttcctcttatacactaatcctgctcactgtgctccacatgccttcacatgaaggcaggaagaaagcccttgtcacctgctcctcacatctaactgtggttgggatgtggtacgggggtgcttctttcatgtatgttctacccagttcctttcacacccccaaacaagacaatatcttctctgttttctacacaattgtcaccccagctctgaaccccctcatctacagcctgaggaataaggaggtgactggggctttgaggagagtcctgggaggacgcctattgccagaacactctacattctaa

SEQ ID NO: 541 - DNA, 954 bp, Mus musculus
  MOR283-5
atggagttcaggaattcaactttaggaagtggcttcatcttggtaggaatcctgaatggcagtgactctcctgaactactctgtgccacaattacattcctgtacacactggcactgaccagcaatggactgctgctccttgtcatcacagtagatacccggctccacgtgcccatgtaccttctacttgggcagctctctctcattgatctcctcctgacatcagtcattactcccaaagctgtcatggattttcttctgagagacaacactatctcctttggaggctgtgcccttcagatgttcattgaattggtactgggtggtgcagaggaccttcttctggcttttatggcctatgacaggtatgtggccatttgtcatcctctgaactacatgatcctcatgagtccaagagtctgctggctcatggtgactgcatcatggatcctgtcaatccagatggccctgggatttaccatcaacacaatgcattattctttctgcaaatcgaggcatatcagacacctcttctgtgagatccctcccttgctggatttggcctgtgcagacacctctagttataagcttgtggtttatttggtaggtgtgttcatgttaattctccctcttactgccatctttttctcttatgcacggattttgttcactgttctccacatgccttcaaatgagagcaggaagaaagcccttgttacctgttcttcccatatgactgttgtaggcatgtactatggggctctcacagtcatgtatttcctaccaagttcctaccacaatcccaagcaagacaatatcctttctgttttctacacaattgtcaccccagctttaaacccactcatccacagcctgaggaataaggaagtgactggggctctgaggaaagtcctgggaaatacttgttgccaccaccccatacatttaaggtag

SEQ ID NO: 542 - DNA, 948 bp, Mus musculus
  MOR283-6
atggaagtcttcaactccaccttgggaagtggcttcatcttggtaggaattctgaatgacagtggttttccagaaatgctctgtgccattatcatagcactatactttttagccttgaccagcaatggactgctgctgctggtcatcaccatggatgcccgactccacatgcccatgtatcttctgctctggcaactctctctcatggacctcctccaaccatcagttatcattcccaaggccgtactagattttcttctcaaagataacactatctcatttgggggatgtgcctttcagatgtttctggcactgacacttggtagtgcagaggacctccttctgtcctttatggcttatgacaggtatgtggccatttgtcatcctctgaactatacaatcctaatgagtcagaaagtctgctatctcatgatagccacctcatggattcttgcatctctcagtgctctaggatatagcatgtataccatgcagtatcctttctgcaagtccaggcagatcagacatctcttctgtgagattccacccttgctgaagctggcctgtggtgacacctccacatatgaactcatggtttatttgatgggtgtgactttgctctttcctgctcttgcggccatcctgacctcctactcactaattctgcttactgtgctccatatgccctcaaatgagggcaggaaaaaagcccttgtcacctgctcttcccatctgactgtggttggcatgtggtatgggggtgctattttcatgtatatcctgcctagttccttccacagccccaaacaagacaatatcagctcagttttctacatgattgtcactccagctctgaatcccctcatctacagcctgaggaataatgaggttattgaggctttgaaaagagtcctgggaaaaaagttttcagtgcattccacattctag

SEQ ID NO: 543 - DNA, 957 bp, Mus musculus
  MOR260-4
atgggaggaggaaaccaaacttatattgtagaatttattctactgggactctcagagaatcctaaagtacaaatcttattattctgtattttcctgatcatctatttcctttctgtatttggaaacctggtcattataatcctcatccaaattgactctcgacttcatacacccatgtactttttcctcaaaaacttatcctttgctgacctctgcttctctacaagcattgtaccccagatgctggtccacttcctttcaaaaaggaaaaccatttcctttattggatgttcaatacagatagttgtctttctcctagcagggtgcacagagtgtgctctgctggcagttatgtcctatgaccggtatgttgctgtctgcaaacccttgcactactccaccattatgacccagagggtttgttgccagttggctatagtttcctggatcagtggggcatttgcatgttcagtggacagtgcatttacactgtgtatcccttatcagggacagaatgtaattaatcattacttctgtgaaccccctgccctcctaaagctggcttcagctgacacctataatgctgaaatggctctgtttttagtgggggtgattattctattagctcctgtctcactcatccttgtctcctatgggaacatcatctccactgtgatccggatgcagtcaagggagggaaggctcaaggtcttttcaacctgtgggtcccacctcactgttgtggtcctctactatgggtctggaatatttgcctacatgagacccaactccaagacaatgagtgaaaaggataaggttgtctctgtgttctactcagttatgacttccatgttgaatccaatcatttacagcctcagaaacaaagatgtgaaaggtgctcttgggaagctggttggaagactgagcacggtcaagggcggtgctgcagaaatgtaa

SEQ ID NO: 544 - DNA, 960 bp, Mus musculus
  MOR283-7
atggagtttaggaactcgacgatgggcaatggcttcatcttagtggggattctggatgacagtggcgctcctgatctgctttgtgccacaatcacagccctgtacatgttggctttaaccagcaatggagtgctactcctggtcatcactatggatgcccggctccgcgtgcccatgtatctcctacttggacagctgtctctcatggacctcctcctgacatcagttattactccaaaggctgtcatagattttctgctcaaagacaacaccatctcctttggaggctgtgctcttcagatgtttctagaactggtactgggtagtgcagaggacctccttttggcctttatggcctatgacaggtatgtggccatttgtcatcctctaaattacatgatcttcatgaggccaagtgtctgctggttcatagttggtactatatggatcctggcatcagtgatagccctaggatttaccatctacactatgaattatcccttctgtaaatcccggcagatcagacacctgttctgtgagattcctccattgctgaagctggcctgtgaagatacatccacatacgagttgatggtttatttggcaggtgtttctgttctgattctccctcttgctgttattctggcctcctatgtacgaattctgtttactgtactccacatgccttcaaatgagggcaggaagaaagcccttgtcacctgttcttctcatctgattgtggttgggatgtggtatggaggctcttcactcatgtatgtccttcccagtcaattccacagtcccaaacaagacaatatcctctccattttctatactattgtcactccagctctgaatcccctcatctacagcctgaggaataaggaggtcacaggggctttaaggagaatttttggaaaatggttggggccagcccactttctaggtagttctttctaa

SEQ ID NO: 545 - DNA, 951 bp, Mus musculus
  MOR262-10
atggctgggacaaaccacacagaggtgatagagtatgtcctgctgggacttcaggaccaccacggcctcgagatcgctctgtttgtgctctgtctgggtatctactgtatgactctgctagggaactccttccttgtggggctgattgtgttggacacccacctgcacagccccatgtacttcttcatcagcaacctctctctcatagacatctgcggtacctcttccttcacacctatgatgcttctcaacttcctggatgtccaaaggaccatctccttccccagctgtgccctgcagatgtacctgaccctggccctaggtacaacggagtgcctgcttctggctgtgatggcatacgaccggtacgtggccatctgccagcccctccactacccggagctcatgaatgggccgctatgcatccagatggcaggaataagctgggggactggctttgccaactcgctcctgcattccatcctggtctggcatctccccttctgtggtcattacatcatcaaccatttcttctgtgagatcttggcagtgctgaaactggcctgtggggacatttccctcaacgcgctgatattaacggtggccacagctgtcctgacaatgaccccgctcctgctcatatgcctctcttacattttcatcctggctgctatccttagggtgccctctgctgcaggccggagcaaggccttctccacctgctctgcccacctcacggtggtggtgattttctatggaaccatcaccttcatgtacctcaagcccaaagaccaagaccccagcgtgggtaagattatcacgttgctctatgcgatcgtggcgccctcactgaatgccttcatctacagtctgaggaactcagaggtgaaagctgctgtcacagccttgttatggggaggtctactcaccaggaaaatgtcccacttttaa

SEQ ID NO: 546 - DNA, 966 bp, Mus musculus
  MOR206-4
atgaacacctggaattacacaaaagagtcagacttcatcctcatgggactgactgattccaaagagatacaactagtccttactgtgctgtttgtcctgatatacctggtcactgtgctggggaacgcaggcatgatgctgatcattcgtctagatgctcagcttcacactccaatgtacttcttcctaagtcatttgtcattcctcgatctcagttactcaactgtcatcacacctaaaactttacagaatctgctgacttccacaaaagtcatttcctttattggttgtttcactcagatgtatgcttttgtcctcttggctgctgctgaatgttttcttcttgcttcaatggcctatgatagatatgtggctatttgcaaccccttacaatacccagttatcatgtccacaagattctgtagtacccttctcactggttcctatatgattggaactatggattccactgttaatatattttgtatgaacaccttatatttctgcagaaccaaggtaattcatcactttttttgtgacacatccccaattttagcactgtcttgcagtgatacacgtaacattcaaatcattatattcatctttgctggttccactctagtggtgtctcttatcacaatatctgcatcctatgtgtctattctctctactattttgaaaatcaattccacttcaggaaagcacaaagccttctccacttgtgcttctcatctcctaggagtcactgtcttttatggtactttgatttttacttacttgaaaccaagtaattcctactactcaggaaaggaacaagtggcttctgttttctatactatagtgatccccatgctgaacccactcatttatagtctcagaaacaaagaagtgaaaagtgctatccatagagttatcaaaaagcagaaaggctcaagacttaaattcagagtggcactaagtgattaa

SEQ ID NO: 547 - DNA, 939 bp, Mus musculus
  MOR181-2
atgcagtatacaaactataccaagccaacagagtttatatttatcggatttacagattaccagccaataagactcatgctatttttggtgtttttcatagtttacaccttaactttggtgggaaatattggcttaataatcctagttaatattgacttaagccttcaaactcccatgtatcactttcttagcaatctgtctttcttagatatcagctattctacagccattgcacctaaaatgctggtagacttcttagcctccaagaagagcatctcattctgtggatgtgctatacagatgtttttctttgcatgctttgcagatgctgagtgccttatcctggctgcaatggcatacgaccgctatgcagccatttgcaacccactgctttactctacattggtgtctcgaagggtctgcttcagccttgttgtgttggcttattttagcggaagtgtgacctcactggtgcatgtatcccttgcatttatgcttccatactgtaggtccaatattgtcaaccactttttttgtgatatcccacctctccttgctttatcatgtgcagatactcatattaatgagcttctgctctttgctttatgtggtacaatccagaccagcactttcatggtcatccttatttcttactcttgcatcctcattactgttttgagcatcaagtccacaggaggcaggagcaaaacattttccacttgtgcttctcatctcatagcagtcaccttgttctatggaacactgctgtttatgtacttgcgtcccaccactagctattccccagacactgataaggtagttgctttgttttatactgttgtatttcctatgttgaatccaataatttacagcttcagaaataaggatgtgaaaaatgcattaaaaaaattgtttgatagactggggatcttcagatga

SEQ ID NO: 548 - DNA, 933 bp, Mus musculus
  MOR179-2
atggaaaacatcactgaagtcacagaatttatactgatgggctttacagacaatgctgacctggagatcctttccttcttcctctttctagcaatttacctcttcacactcatgggaaatttaggactgattactctggtcattggtgactcccgcctgcacaatcccatgtactattttctgagtgtgctgtcctcagtagacgcctgctattctactgttatcacaccacaaatggtagttgactttgtgtcagagaagaaagtcatttcattcattggctgtgccacacagatgtttctggctgtgacttttggtacaactgaatgttttcttttggcagcaatggcttatgaccgctatgtggccattcacaaccctcttatgtatgtagtgagcatgtcaccaagagtctatgtgccactcatcattgcttcctatgctggtggaattttacatgctgttattcacacggtggctactttcagactctctttttgtggatccaataaaatcagtcatattttctgtgacatccctcctctcctggcaatttcatgttctgacacccacttcaatcagcttctcctcttctattgtgctgggtttattgaggtagtcactatcctgattgtcctgctgtcctatggcttcattttgtctgtcattttgaagacacgctctactgaaggtaaaagaaaagtcttttctacatgtggctcacacctaatggcagtgtccacatttcatggcactgttcttttcatgtatgtgagaccaagtgacagctatgccttggaacatgacatgatggtatcaatattttacagcattgtaatcccaatgctgaatcctctcatttatagtttgaggaacaaagatgtaaaagaggcaataaaaaaagtttttggaaaaagaatactttgtggataa

SEQ ID NO: 549 - DNA, 933 bp, Mus musculus
  MOR179-3
atggagaatgtcactgtgtctcttttcatcctgaggggcctcacagacaatgctgaacttcagatcagtctttttttcttatttctaatgatttatcttttcacactcatgggaaacataggactgatctcagtagtcattggggattctcagctccacaacccaatgtactattttctaggtgttttatcattcatagatacttgtttttctaccattatcacccccaaaatgctaatagattttatgtcaaagagaaaagtcatttcattccttggatgtgtagcacagatgtttcttgctgttagctgtggaaccacagagtgttttctcttggctgcaatggcttatgaccgctatgtagctatttacaacccacttctgtatgcagtgaacatgtcacccagagtctacatgtcactcatcattgcctccaatgttggtggtattttgcatgcatctatccatacagcagccactgctagcttgtcgttttgtgactctaatgaaattaagcattttttctgtgatattccccctttactggctatttcttgctctgatactaaaatgaatgagcttctactcttcatctttgtgagctccattgaggtagtcactatcttaatcatcatcgtctcttatagttttatcctgtttgctatcttgaagatgcattctgctgaggggaggccaaaagtgttctctacatgtggctctcacctcactggcgtgtccatatattatggaacaatctttttcatgtatatgagaccaagttccagctacacattagagcatgacatgatagtatctacattttatgccgttgtcatccccatgctgaatcccatcatctacagtctcaggaacaaagacgtaaaaaaggcaatgaaaagacttttagcaaaagtgtttatgtccatacgataa

SEQ ID NO: 550 - DNA, 942 bp, Mus musculus
  MOR191-1
atggagaaacagaatctcacagtgctgagtgaattcattttgaaaggcatcactgaccgtcctgagctgcaggccccactctttgggctgctcttcattatctatctgatctcagcagtgggtaatttaggcatcatcattattactaacgtggactccaggctccacacacccatgtacttttttctcaaacatctggctttcactgatcttggatattctacagccattggaccaaaaatgttagttaattttgttgcagagcataattcagtctcctattatctttgtgctacacagttagcttgctttcttctttttattacttgtgaactttttattctttcttcaatgtcttatgaccgttacgtggctatatgtaaccctcttctctatactgtcatcatgtcacaaagaatatgttgggtacttgtggcagtcccatatatctacagtgtatttgtatctctaattgtcacaataaggttattcactttatccttttgtggctacaatatcatcaatcattttttctgtgattgtatcccattaatatcattgctctgttcaaatacacatgaggttgaagtgataattaggttctttgcaacatttgatttgatttcctctcttctggtcgtccttgtgtcttatctgtttattctcataactattctgaggatgaaatctgctgcaggcagacgcaaggctttttcaacctgtgggtctcacctcactgtggtcattgtcttctatgggactttgatatttatgtatgtgcagcctaagtccagtcaaacatttgagactgataaagtgtcttccatattttacacacttgttatcccaatgttgaatcccttgatctataccttgaggaataaagatgtaaaagatgccatagaaagaacctgggaaaagatagttaccagtttttcttaa

SEQ ID NO: 551 - DNA, 948 bp, Mus musculus
  MOR196-1
atgccatccttaaacaacactgcagtgatggatttcattcttgtgggactcacagacagcccagtgctggggagaatcctctttgtggtgtttctggtcatttatcttataacactgacaggaaacctgtgtatgattgtgctgatcaggaccaattcccacctgcaaacacctatgtacttcttccttggccacctctcctttgtagacatttgctactcttccaatgttactccaaacatgctgcatggtttcatctcagaccagaagatcatttcctatgctggatgcttcacacagtgtctcctcttcattgctctggtgatcactgagttttatctccttgcttcaatggcactagaccgttatgtggctatttgcagccccttgcattacagtaccaggatgtccaagaatgtttgtttctctctagtctcattctcatatgtgtttggtttcctgaatgggctgtctcagactctgctcactttccacctgtctttctgtggctcccatgaaatcaatcacttttactgtgcagatcctcctcttatcatgctagcttgctctgacactcacgttaaaaagatggccatgtttgttgttgctggattcactctaataagttctctctctatcattcttttctcctacctgtacatttttgcagccatcatgaggatccgttctgcagaaggcaggcaaaaagccttttctacatgtggttctcacctgacaacagtcaccatattttatggaacccttttctgcatgtatttaaagcctccatcagagaggtcaatagaggagtccaaagtaattgcagttttttacacttttctgagtccattcctgaaccctttgatctatagcctaaggaataaggatgtcatcaatgctatgaaacaggtgatcaaggggaatttctgtcagaaaattttggtttaa

SEQ ID NO: 552 - DNA, 957 bp, Mus musculus
  MOR196-2
atgctggcacctaagaaaatggtcagaggcaattactccatggtgactgaatttattctcttgggattaactgatcgtccagagctgcagcctttgctttttgtgctcttcctggtgatctatctgatcactgtgggagggaatcttggcatgatggtgttgatcaggatagattcccgcctgcataccccaatgtactactttcttgccagtttgtcatgtttggatttgtgctattctaccaatgtgactcccaagatgctggtgaactttttatcagagaagaaaaccatttcatatgctgcatgtttagtccagtgttattttttcattgctatggtgattactgaatattacatgctagctgtgatggcctatgacaggtatatggccatctgtaaccctttgctttacagtagcaagatgtccaaaggggtatgtgtgcgtctgattgctggtccctatatctatggcttccttagtggcctgatggaaaccatgtggacatatcgcttgaccttctgtggctccaatatcatcaaccacttctactgcgctgaccctccactcatcagactctcctgctctgacacattcattaaggaaacatcaatgtttgtagtagcaggatttaacctctccaactccctgttcataatcctcatttcctacctgttcattctcattgccatcttgaggatgcgttctgctgaaggtaggcgcaaagccttttccacctgtggatctcatctggtggcagtgactgtgttttatgggacgctattctgcatgtatgttagacctcccacagataaatcagtggagcagtccaaaattattgctgtgttctatactttcgtaagtcccatgttgaaccccatcatttatagtctgaggaataaggatgtgaaacatgctttttggaagctggtcagaagaaatgtgctttcaaagtaa

SEQ ID NO: 553 - DNA, 936 bp, Mus musculus
  MOR196-3
atgactttcttaaaccatactgcaatgatggacttcattcttatgggactcacagacagcccagtgctggggagaatcctctttgtggtgtttctggtcatttttgttatcacactggcaggaaacttgttcatgattgtgctgatcaggaccaattcccacctgcaaacacctatgtacttcttccttggccacctctcctttgtagacatttgctactcttccaatgttactccaaacatgctgcatggtttcatctcagaccagaagaccatttcctatgctggatgcttcacacagtgtctcctcttcattgctctggtgatcactgagttttatctccttgcttcaatggcactagaccgttatgtggctatttgcagccccttgcattacagtaccaggatgtccaagaatgtttgtgtctctctagtcgcattcccatatgtgtttggcttcctgaatgggctgtctcagactctgctcactttccacctgtctttctgtggctcccatgaaatcaatcacttttactgtgcagacccccctctgatcatgctagcttgctctgacactcatgtcaaaaagatggccatgtttgtggtagctggctttactctctcaagttcccttgctatcattcttctatcttaccttttcattttcatagctatattgaggattcgttcagctaagggaaggcaaaaggccttttctacatgtggttcccacatgacaacagtcaccatattttatggaacccttttctgcatgtacttaagacctccatcagagaagtctgtagaagagtcaaaagtaattgcagttttttacacttttttgagtccaatgttgaaccccttgatctatagcttaaggaataaagatgtcatcaatgccatgaaacaggttgttaaaggaaaactacttcactaa

SEQ ID NO: 554 - DNA, 936 bp, Mus musculus
  MOR260-5
atggaccatatgaaaataaatttcacagtgactgagtttgtgtttctggggctttcatctgatcccaaggtacagctggttctcttttttgtattcttgtttttctatatgttgtcagtggttggcaatatcatcatcattactattattcagatagaaccccgcctgaaaacccccatgtacttcttcctcgctaacttgtcctttctggacatctgctacacatccactaatgttccgcagatgctttccaacatggtggggagtaagaagaccatcccttttgtcagctgtgccacgcagatgtatttctcactctcctttggaatgattgaatgtgttcttcttggtgttatggcttatgacagatatgtagccatctgtcatcctctccactacactgttattatggaccaaaacacctgtgtccaactggcagccatttcttggtccagtagcttcctcagttccatggttatcaatgttctcaccttgagtttgccctactgtggaccaaatgtcctgaatcactttttctgtgaggttccttcagttctgagactggcttgtactgacacttcactcactgagctggtggtttttgtatttagtatcatcattgtcttcattcctttcctccttattattgtttcctatgcccgcatccttctttctgttctcaggatgcgatcagcctctgggaggcacaaggctctgtccacctgtgcctcccatctcacagttgtgaccttattttacggaactgccatctttatgtacatgagaccacagtcaaagtcctccagggctggtggaaaggtcattgcagtattctacactgtagttacacctatgcttaacccattaatttatagcctaaggaaccaggatgtcaaaggatctctgaggagagctatcacaaaacagaagacataa

SEQ ID NO: 555 - DNA, 960 bp, Mus musculus
  MOR185-5
atggatgaagataacaattcaacagtacatcagttcatcctcgtaggcctgacagatgacccagagcttgaggtcatcctctttgctgtgtttctggtcatctacttaactactgtcttgggtaacctaggactgattatgctaatccaagtcagccctcagcttcacacacccatgtactttttcctctgccacttggcattcgttgatttctgttatacatcctcagtcactccaaacacaattataaactttcttcgagacatcaaaagtataaccttctatgcatgtgccactcaggtttgctgtttcatcacatttgctgtttgtgaaatgtacttgctgtcagtaatggcttatgacagatatgtggccatctggaaccccctcctctatgtggtcctcatgcctaaaaagctctgtcttcgggtcatcgccagcacatacatttatggattcactgtggggcttgcacaggcagtggcaactttccgcttgtctttctgtggctccaatgtgatcaaccacttctactgtgatgatgtccccttagttgctctggcctgttctgacactcatgtcaaagagctgatgttgctaatcattgctggcttcaacactctttgctctctggtgattgtggttatttcttacatctgcattctctttgccatcctgaggattcattctgctgaaggaagaaggaaagccttttccacttgtgcatcccacctgacttccatcaccatattttatggaacaatcatttttatgtacctgcagcccaagtcaagccattctctgaacacagataaatttgtttctgtgttttacgtggtagtaattcccatgttaaatccgctgatctatagtttgagaaataaggaggttaaaaatgccctgaagcgatttactgaaaaattgtctttgaccatccatgattccagaaagtctgagtag

SEQ ID NO: 556 - DNA, 924 bp, Mus musculus
  MOR196-4
atgttaaagaaaaactttacaacagttacagagtttattttcctaggattgacagatcgagcagagcttcagcctgtgctctttgtggtattcctactcatctacctcatcacagtgactggtaacgtgagcatgatcttcttaatcagaagtgacagcaagcttcacacacccatgtacttcttcctcagccatctctcctttgtagatctctgttatgccaccactgttgcccctcagatgttggttaactttttatccaagaggaaaaacatttcttttattggctgcatcattcaattccacttttttattgccctggtgatcacagactactatatgcttgcagttatggcttatgattgttatgtggccatctgcaagcccttgttatatactagtaaaatgtcccgaagagtctgtctctctcttgtggccacacagtacatttacggctttgtaaatggtttaatacagaccattctgatgcttcgtttaaccttttgtggacccaatgagatcaatcacttctactgtgcagatccaccactcatggtccttgcttgctcagacacctatgtgaaaaaaactgccatgtttgtggtggcaggatccaacctcacctgttctctcaccatcatcctcatctcctacattttcatctttacagccattctgcggatccgttctgcagaggggaggcagaaggccttctctacttgtggatcccacctgactgctgttaccatcttttatggaacattgttctgcatgcacctgaggcccccctctgagacatctgtagaacaagggaaaattgtggctgtcttttatatctttgtaagtcctatgttaaacccattcatctatagtctgaggaataaagatgtgaaaaatgcaataaggaaagtgatccagaaatga

SEQ ID NO: 557 - DNA, 960 bp, Mus musculus
  MOR185-6
atggctcagataaactgcacccaggtgacagagtttattcttgtgggcctcacagatcgcaaggagttaaagatgcccctctttgtggtgttcttattcatctatcttttcacagcaataggcaatctgggattgatcttggtcattagaacagatgcaagactcaacacacccatgtacttcttcctcagcaacctggcttttgttgatttctgctactcctctgtcattacacctaagatgcttgggaatttcttgtatagcaaaaatgccatatccttcaatgcatgtgctgcccagttaggctgctttctcacatttatggtatcagagtgcttgctcctggcttccatggcatatgatagatatgcagcaatttgtaaccctctattgtatatggtcacaatgtctcctggaatctgcattcagcttgtagttgtgccctatagctatagtttcctcatggcattgattcacactcttctaaccttccgcctatcctattgccattctaatatcatcaatcacttctactgtgatgacatgcctcttctcaggctaacttgctcagatactcactacaagcagctgtctattttggcctgtgctggaatcacattcatttcttctgttctgattgtttctgtatcctacatgttcattatttctgccattctgaggatgcgctcagctgaaggaagacggaaagccttttccacctgtagctctcacatgatggcagtgagcatattctatggaactcttatctttatgtacttacagccgagctctgaccattctcttgatacagataagatggcctctgtcttctacacagtgatcatccccatgttgaaccctttgatctacagcctcaggaacaaggatgtgaaagatgccctgaagagggtcatggacaatagaaaccagacttctatatttagagaactaagaaaatga

SEQ ID NO: 558 - DNA, 951 bp, Mus musculus
  MOR194-1
atggagaaatccaaccacagtgcgaggatccaggtcactgaatttattctcttgggactcaccaacaacccaggcctcaaagcaccactctttgtaatatttttaatcatatatttggtaacactgatgggcaatctgggcatggttatcctgactcatgtagactcgaaactacatactcctatgtactttttcctgagacatttatcaatcacggatcttggctactctacagttataggtccaaaaatgatggtaaactttgtaatgcagcagaatatcatttcctacacagggtgtgctgtgcaactgacattctttgagattttcatcattactgaactgtttatcctctcagccatggcttatgaccgctatgtagccatctgcaaacctcttctctatgtgatcatcatggcaggaaaagtacgttgggggctggtactggtaccctatctctatagcctatttgtgtccttacttctcacagttaagttattcacactgtccttttgtggctctaacaccattagttacttttattgtgactgtgtccctctgatatctctgctctgttctgacacacatgaattagaactgattattttaattttctcaggctgcaatttactctcttccctcctcattgtgctggtgtcttacatgttcatttttgtggcaattctcaggatgaactccaaggaggggaggtccaaagccttctccacgtgcagctctcatctgacagtagtggttgtgttctatggaacactgctgtttatttacctgcaacccaaatctagtcatacttttgaaattgataaaatggcctctgtgttttatacactagtcattcctatgctcaatccattgatatacagcctaagaaacaaagaagtaaaggaggcccttaagagaactcttactcagggactcagaatccacacttaa

SEQ ID NO: 559 - DNA, 954 bp, Mus musculus
  MOR201-1
atggtccgaaccatgaaaggaatccaagataagaatgcaacagaagtgacagaatttatccttttgggcctctcagagaatccagacctacaaggtgttctctttgcattattcctgatcatctacacgatgacactggtgggtaatttgggcatgatggccctgattaagattgaccgcagtctgcacacacctatgtacttctttctcagcagcctctcttttgttgatgcctcttcctcttctacagtcacccctaaaatgctgctgaaccttgtggctgaggataagagcatttctttcaatggatgtgctacccagtttttcttctttggctccttcttgggaactgaatgcttcctgctagccatgatggcctatgaccgctatgcagccatctggaatcccttgctatacccagttctcatgtctgggagcatttgtttcatgttggtgtctacttcattcctagcaggctttggcaatgcagccatccacacagggatgactttcagactgtccttttgtggctctaataagatcaatcatttctattgtgacaccccacccctgctcaaactctcttgctctgacatccatatcaatggcattgtgatcatggccttttccagttttactgttctcatctgtgttctgattgttctgatttcttacctgtgcatcctcattgccatactgaagatgccttctgcagagggaagacacaaagccttctccacctgcgcctcacacctcatggctgttaccatcttttttggttcaattctctttatgtacttgcgacctactactagctactctatggagcaggacaaaattgtctctgtgttttatacagtggtgattcccatgcttaatcctctcatctacagtttaaaaaatagagatgtgaaagaggcagtaaaaaaaatcttacagaaacacattctataa

SEQ ID NO: 560 - DNA, 954 bp, Mus musculus
  MOR201-2
atggtcaggagtggaaaaggaatccaaaataagaatgccacagaagtgacagaatttatccttttgggtctctcagacaatccagacttgcaaggtgtcctctttgcattattcctgatcatctacacgatgacactggtgggtaatttgggcatgatggccctgattaagattgaccgcagtctgcacacacctatgtacttctttctcagcagcctttcttttgttgatgcctcttattcttcttctgtcacccccaagatgctagtgaacctcatggctgaggataagagcatttctttcaatggatgtgctacccagttctttttcttcggttccttcttgggaactgaatgcttcctgctagccatgatggcctatgaccgctatgcagccatctggaatcccctgctatacccagttctcatgtctgggagaatttgtttcatgttggtgtctacttcattcttagcaggctttggcaatgcagccatccacacagggatgactttcagactgtccttttgtggctctaataagatcaatcatttctattgtgacaccccacccctgctcaaactctcttgctctgacactcacattaatggcattgtgatcatggccttctccagtttcaatgtcatcagttgtgttctgattgttttgatatcttacttgtgcatcctcattgccatactgaagatgccttcagcagagggaagacacaaagccttctccacctgtgcctcccacctcatggctgttaccatcttttttggaacaattcttttcatgtacttgcgccctacctctagctactctatggaacaggacaaagttgtctctgtgttttatacagtagtcattccaatgcttaatcctctcatctatagtttaaaaaataaagatgttaagaaagcagtgaagaaaatcttacataattatgtggtttga

SEQ ID NO: 561 - DNA, 933 bp, Mus musculus
  MOR199-1
atgctcaatttcacagatgtaactgaatttattctactgggcttaaccagcagaaaggaactgcaagttctcttctttgtcatctttctcatggtctacatagttaccatggtgggcaacattggcatgatgattttaattaagatcagtccacagctcagcagcccaatgtactttttcctgagccatttgtcatttgttgatgtgtggttttcttccaatgtcactcctaaaatgctagaaaacttattgtcaaagacaaaaacaatttcttatgctggctgcttagtacagtgcttcttcttcattgcccttgttcatgtggaaatcttcattcttgctgtgatggcttttgacaggtacatggcaattggaaagcctctgctctatggcagcaaaatgtccagggtggtttgcattcgacttatttctttcccctacatatatgggtttctgactagtctggctgcaaccttatggacttatggcttgtacttctgtgggaaaactgagatcaatcacttctactgtgcagatccaccccttatcaagatggcctgtgcagggacctttgtgaaagaatatacaatgattatacttgcaggcattaacttcacatattcactttctgtagtcatcatctcctacctgttcattctcattgccattctcagaatgcgctcagcagaaggcaggcgcaaggcattttccacctgtgggtctcacctcacagcagttgtaatattttatggcactctcatcttcatgtacctcagacgacccactgaggagtcagtggagaaagggaagatggtggctgtgttctacaccaccgtgatccccatgttgaaccccatgatctacagtctgaggaacaaggatgtcaaagaagccatggacaaagtgattagccgaaagggcttaactaagtaa

SEQ ID NO: 562 - DNA, 933 bp, Mus musculus
  MOR199-2
atgctcaatttcacagatgtgactgaatttgtccttttgggattaaccagaagaaaagaactgcaagttctcttctttgtcatctttctcatggtctacatagttaccatggtgggcaacattggcatgatgatattaattaagatcagtccacagctcagtagcccaatgtactttttcttgagccatttgtcatttattgatgtgtggttttcttccaatgtcactcctaaaatgctggaaaacttgctgtcaaagacaaaaacaatttcttatgctggctgcttagtacagtgcttcttcttcattgcccttgttcatgtggaaatcttcattctttctgtgatggcttttgacaggtacatggcaattggaaagcctctgctctatggcagcaaaatgtccagggtggtttgcattcgactcatttctttcccctacatatatgggtttctgactagtctggctgcaaccttatggacttatggcttgtacttctgtgggaaaactgagatcaatcacttctactgtgcagatccacccctcatcaagatggcctgtgcagggacctttgtgaaagaatatacaatgctatttcttgcaggcattaacttcacatattccttgattgttgtcatcatctcctacctgttcattctcattgccattctcagaatgcgctcagcagaaggcaggcgcaaggcattttccacctgtggatctcaccttacagcagttggcatattttatggcactctcatcttcatgtacctcagacgacccactgaggagtcagtggagcaagggaagatggtggctgtgttctataccacagtgatccccatgttgaatcccatgatctacagtctgaggaacaaggatgtcaaggaagccatggacaaagtgattgccaagaagttcttaacaaaataa

SEQ ID NO: 563 - DNA, 945 bp, Mus musculus
  MOR185-7
atggccaaaagcaaccattcagtggtgacagaattcatcctcttggggcttacagaagatcctgaacttcagatcatcctctttgtaatccttctaatcatctacttgttcagtgtcatgagtaacctagggttggttgtgttaatacaaatcagcccacagctccagtcccctatgtattttttcctcagccatctggcttttgttgatttttgttatacctcctgtgtcacgccaaatgcgctggtgaattttttgcgtgagattaaaagcatatcgttttatggatgtgcagctcaagtgtgtttcttcaccacattttctgtgtgcgaagtcttcctgctgtctgtaatggcctatgataggtatgtggccatctgtaaccctttgctctatgtcattctcatgccgcggagactctgcattcagatagccattaccacgtacatttatgcatttgtcacagcacttattcagacagtgaccacattcattttgtctttttgtgactcgaacctagtgaaccatttcttctgtgaagacattcctctcatggctctagcttgctcaaacactcaagtcaaggaactgctgctgctgagcatggctgggttcaatgtgtgctgctctctcctcattgtcctcatctcctacctattcatcgtgtctgcaattctaaagaagcattcgggggaagggaggcagaaagtcttctccacctgtgcttctcacttgtcttctattgccatatactatgggacaatcatttttatgtacttacaacctgaatctagccattccctaaatacagacaagtttgctgctgttttctatgttgtggtgatccccatgctaaatccattaatttatagcttaagaaatacagaggtgaaaaatgcattgaagaaaagtatagataatatccctataaatattagtaagtga

SEQ ID NO: 564 - DNA, 945 bp, Mus musculus
  MOR120-1
atgatggacaatctctctagtgcaactgaattctgccttctgggtttccctggatcccaagagctacactacatcctttttgccatattctttttcttctattcagtgacactgctgggaaacatggtcatcatcattattgtctgtgttgataaacgtctacagtcccccatgtacttcttcctgggcaacctctcactcctggaaatcctggttacaactacaattgttcccttgatgctttgggggcttctgctccctggaaagcagacaatatctctgaatggatgcattgcccaactcttcctttacctcgctctagggaccacagagtttgcagtgcttggagcaatggctgtggaccgttatgtggctgtctgtaatcctttgaggtatagcgtcatcatgaacagccgcacttgcatctgggtggtcatggtgtcctggatgtttgggttcctttctgaaatctggccagtctatgccacattccagtttactttctgcaaatcaaatctcttagatcatttttactgcgaccggggccaattgctcaaattatcttgtaatgaaacctttctcacagagttcattcttttcataatggctattttcattattgttggatccttgatccctacaattgtctcctacacctatatcatctccaccatcctcaagatcccctcagcttctggccggaagaaagccttctccacctgtgcctcccatttcacttttgttgtgattggctacggcacctgcttgttcctctatgtgaaacctaagcaaacacaggcagcagagtacaacagagtggcctccctgctggtttctgtggtcacgccttttctgaaccccttcatcttcacacttcgaaatgataaagtcaaagaggcccttagagatggagtgaagcgttgctgtctgctcctcagggattag

SEQ ID NO: 565 - DNA, 954 bp, Mus musculus
  MOR202-20
atgtctctgatggagaataatacaaaagtgacagagtttcttctgctgggactcaccaatgacccagaattacagcttcccctcttcttgatatttctcctcatttacaccatcaccctggtgggaaatctggggctgatcctgctgattgtcctggactcttgtctccacactcccatgtacatttttctaggtaatctgtccttggttgatttttgttactcctcagctgtcacacctagtgtcatgactgagcttctaataggaaaaaaggtcatttcctacaatgactgtgctgctcagacgttcttttttgtagcattctgtactgtggaaaattatctcttggcatcaatggcctatgatcgctatgcagcagtgtgtaagccattgcactatgccagcactatgactacaagagtatgcatctatctttctataggttcttatgtgtgtggtttcctgaatgcctccatcaacactggaaacactttcagtcttttcttctgtaggtacaatatgattcatcatttcttctgcgacattccagcagtcatggttctctcttgctcagacagatacttcagtgagctacttcttgtttatgtagtgagcttcagtatattttttgctctcttggttatttgtatatcctacatattcatttttatcacaattgctaaaatgcactcaagtgctggatatgggaaggctgcacccacttgtgcctcacacttcactgcagtgtctattttctatgggactgtcatattcatgtatttgctgcccagctccagtcactctatggacactgatcaaatcgcatctgtgttctacaccatgatcatccctatgctgaaccctctggtctacagtctgcggaacaaagaagtcaagagtgcattcacaaaaatttttcaggtggcaaaacagtctgtaatgctttatttttaa

SEQ ID NO: 566 - DNA, 957 bp, Mus musculus
  MOR175-1
atgatgcacagaaatcaaactgttgtgactgagttcttcttcactggattaacctcctccttccatctccaaattgtcctcttcctgacatttctctgtgtttatctcgcaactcttctggggaacctgggaatgatcattcttattcacctggacactcgactccacatccccatgtacttttttctcagccacttgtcctttgtggatgcctgctcctcttctgtcataagtcctaagatgttgtctgacatgtttgtggataaaaaggtgatctccttcttaggttgtgctatccagctttgtttatttagccagtttgtagtgacagaatgtttcctcctggcctccatggcttatgatcggtatgttgccatctgtaagcctttgctgtatactctcatcatgtcccagcgagtctgtgtacagttagtgattggcccttacagcataggctttataagcactatggtccatattatttctgcatttgtccttccatactgtggtccaaatctcatcaatcactttttctgtgaccttcttcctgtcctctcactggcatgtgcaaatactcagatgaataaacgtttgcttttcatcgtggctgggatcctaggtgtattcagtggtataatcatattggtgtcctatgtttacattgccatcaccatcctaaagatcagttctgctgatgggaggcgcaaagccttctccacctgctcttcacacctgacagcagtctctattctttacgggactctcttctttatctatgtacgtccaagctccagcttctctctggatatcaataaggttgtgtcactattttataccactgttatccctatgttgaacccattcatttatagcctgagaaataaggaagtcaaagatgcattaatcaggacatttgaaaagcagttttgctacagcttgcaagataaaatactataa

SEQ ID NO: 567 - DNA, 957 bp, Mus musculus
  MOR175-2
atgatgcacagaaatcaaactgttgtgactgagttcttcttcactggattaacctcctccttccatctccaaattgtcctcttcctgacatttctctgtgtttatctcgcaactcttctggggaacctgggaatgatcattcttattcaccaggacactcgactccacatccccatgtacttttttctaagccacttgtcctttgtggatgcctgctcctcttctgtcataagtcctaagatgttgtctgacatctttgtggataaaaaggtgatctccttcttaggttgtgctatccagttttgtttattcagccagtttgtagtgacagaatgtttcctcctggcctccatggcttatgatagatatgttgccatctgtaagcctttgctgtatactctcatcatgtcccagcgagtctgtgtacagttagtgattggcccttacagcataggccttataagcactgtggtccatactacttctgcatttattcttccatactgtggtccaaatctcatcaatcactttttctgtgaccttcttcctgtcctctcactggcatgtgcagatactcagatgaataaacatttgcttttcatcatggctgggatcctaggtgtattcagtggtataatcatattggtgtcctatgtttacattaccatcaccatcctaaagatcaattctgctgatgggaggcgcaaagccttctccacctgctcttcacacctgacagcagtctctattctttacgggactctcttctttatctatgtacgtccaagctccagcttctctctggatatcaataaagttgtgtcactattttacactgctgtaatccctatgttgaacccattcatttatagcttgagaaataaggaagtcaaagatgcattaatcaggacatttgaaaagaagttttgctacagcttgcaagataaaatattatag

SEQ ID NO: 568 - DNA, 945 bp, Mus musculus
  MOR175-3
atggcggatgagaactatacaaggatcacagaattcattttcattggcttgagataccaccctaatctgcaggtcttcctgttcttgctctttctgcttttttacctggttaccatgacgggaaacttaggtatgatcattctcattcgggtagattctcgtcttcacactccaatgtactttttcctcagccacctgtcatttgtggacatttgcttctcgtcagtcgtggcccccaagatgctcacggacttctttgcagataaaaaagctatctcttttctgggctgtgtcttacagcaatggttctttgggttctttgtggccattgagtgtcttctcttggcatccatggcctatgacagatatgtagccatctgtaaccccctgttgtattcagtagccatgtcccagagactctgcatacagctggtgatcggaccctatgctgttggcttttttaacaccatgactcacacgacagctgctttccgacttcccttttgtggctccaatattatcaatcatttcttctgtgacatgtctcctatcctttccctcatatgtgctgacatacggatcaacaaactgttggttttcatcgtggcaggcgctgtattgattgtcagtagtaccaccatcatagtctcctactttcacatcctcattgccatcctgagaatccgctcagctgaaggtaggaggaaagccttctctacctgctcttcccatgttacagcagtttctattttgtacgggactctcttctttatctatgtgaggccaagcgccatttcttctctggacctcaataaggtggtgtccgttttctacacagcagtgattcccatgcttaacccgctcatctacagcctgaggaataaagaagtgaaatcggccatgggcaggacagttgctaaagccaaagttttcctcaaaaattaa

SEQ ID NO: 569 - DNA, 939 bp, Mus musculus
  MOR213-3
atggatgtagacaatcgcaccatcctgactgaatttattcttctgggcttctcagcagacccccattggcagctgattctatttggaatatttctaaccatctacttgatgaccttgttagggaacatgaccttgattattttaatccgcatcgattccaggctgcacacacccatgtacttttttattggaggtctatcttttttggacttctggtataattctgtatacataccaaaaatcttggtcaactgtgtttcagaggataagcgtatttctttggctggttgtggggctcagtttttcttttcctgtgtagcagcctacactgagtgctacctgctggcagccatggcatatgatcgacatgctgcaatttgtagcccattgctctattcaagcatcatgtccacttctctctgtgctgggctagtgggggcctcctatgtgggagggtttttgaatgccatagcccatactgccaacactttcaggctaaggttctgtggtaaaaatattattgatcactttttctgtgatgtgcttccattggtaaaaatgtcttgtacagacacccgtgtctatgtgaaaatcctttccagtatggtgggcttcactgtcctctcaagcattcttgccatcctaatttcctatctcaacatcctgctggctatactgaggatccgctcagcctcaggaagacgaaaggctttctccacctgtgcctctcacctggtctctgttacactcttctatggctccctgctcttcatgtattcaagacccagttccaactactccctggagagagacaaagtagctgccatgttctatatcatcatcaatccattactcaacccttttatctatagtttgagaaacaaagatgtcaaagaagcctttaagaagttgatgcagactataaaacagcaaacctga

SEQ ID NO: 570 - DNA, 963 bp, Mus musculus
  MOR213-4
atgaccaggttttcctctgtggatatggagttggacaatcgtaccatcctgactgaattcatccttgtgggcttctcagcagacccccactggcagctgactctatttggaatatttctaaccatctacttgttgacattgtcagggaacatgttgctggttgttttaatccgaattaattctagactgcatacacctatgtactttttcatcagcaatctgtcatttttggatttctggtatacttctgtatatacccccaaaatattggccacttgtatctcagaagacaaacgcatttccttggctggatgtggggctcagctgttcttctcctgtgttgtagcatacactgagtgctacctgctggcagccatggcttatgaccgacattctgcaatttgtagtccattgatctattcaagcatcatgtcatcttctctctgtactgggctagtagctgggtgttacatagggggggttttgaatgccatagcccatactgcaaacaccttccggctaactttctgtggtaaaaatattattgaccactttttctgtgatgcaccacccttggtaaaaatgtcctgtacagatacccgtgtctatgaaaaagtcctcctgggtgtggtgggcttcacggtactctccagcattcttgccatcctcatttcctacttcaacatcctgctggctatcttgaggatccgctcagcctcaggaagacgtaaagctttctctacctgtgcctctcacctggtctctgtcatgctgttctatggttccttgcttttcatgtattcaaggcctagttcaacctactctctagaaaaggacaaagtggctgccctcttctatactgtagtcaacccattgctcaaccctctcatctatagcctaagaaacaaagatgtcaaagatgccttcagaaaagcaacacagacaatacgaccacacacatga

SEQ ID NO: 571 - DNA, 918 bp, Mus musculus
  MOR213-5
atggaacaatataatgatacagtgactgagttcatcctggtaggattcacaacaaaccctgtcatgcagctggttctgtttgttatttttcttgctgtgtatgcattaactgtgttaggaaacagcaccctcattgtgttgatctgcaatgactctaggctccatacacccatgtatttcttcattggaaatctgtcttttctggatcttggattgtccacagtctatacaccaaagatcttagtgacctgcatctctgaagataaaagcatctccttttctggctgtgtggctcagttcttcttctctgctggacttgggtatactgagtgttatctgttggctgccatggcttatgaccgctatgtcgctatctcaaagccactgctttattcccaagccatgtccttaaagctatgtgcatttttagttggagtctcatatttgggtggtttaattaactctttcataatcaccaaagacacatttgccttgactttctgcaatgataatgtaattgatgactttttctgtgatatcccacccctggtaaagctcgcatgtggcaaaaagaagagctttcagtctgtgttattcttcctcctgacttccaatgtcatcatccccattgtgttcatcctggccacctatctcttcatcattgccactatcttgaggatccgctccactcagggccgcctcaaggccttctccacctgctcctcccacctcatctctgtgaccttgtactatggctccattctctacatctatgcttggccccggtccagctactctttagatagagacaaaattgtttcaaccttttacacagtggttttccccatgttgaatcccctgatctatagtctgaggaataaggatgtgaaagaggctttgagtaaactgttcaaataa

SEQ ID NO: 572 - DNA, 936 bp, Mus musculus
  MOR213-6
atggagaggggcaatcacacagtgactggcttcatcttgctgggcttctcaacagacccagtgatgcagaagatactatttgtcatgtttcttggagtatattccctgacattgctaggaaacaccaccctcatcatattgatatgcaatgactccaggctccacacacccatgtatttcttcattgggaatctgtcttttctggatctctggtattcttctgtctatactccaaagatcctggtgacctgcatctctgaagacaaaagcatctcctttgcaggatgtctgtctcaattctttttctctgctggattggcctatagtgaatgctacctactggctgccatggcttatgatcgctacactgccatctcgaatcccctgctttatgctcaagctatgtcacgaaggttgtgtgtctgtttggttgtatattcctatacaggaggatttgtcaatgcaataatattaactagcaacacattcacattggacttttgtggtgacaatgtcattgatgattttttctgtgatgtcccacctctggtgaagttggcatgtgatgtcagggagagttaccagtctgtgctctacttcctcctagcttccaatgtcatttctcccactcttctcatcttgacctcctacctcttcatcattgctgccatcctgaggatccgatcaacccagggtcgtctcaaggccttctccacctgctcgtcccacctcatctctgtgaccttgtactatggctccattctctacatctactctcggccaagttccagttattccttggaaagggataaaatggtgtctaccttttatactgtgttattccccatgttgaaccccatgatctacagtctaaggaataaagatgtaaaggaagctctgagaaaactctttaagttagctccttctgaagtctaa

SEQ ID NO: 573 - DNA, 942 bp, Mus musculus
  MOR155-2
atggaaatttcaaaccaatcaggtatttctgaattttttctcactggactgacatattctccagccattgaatcatttatcttcagcttgttcctgtctatatattttgttaccatctttggaaacattctcattatcttggctgtaagattggattatcacctccatacacccatgtacttttttattgccaatctgtcctttactgacatctgtataagtacaacaataatcccaaagatgctgttgaacattgaaacacagaatcagagcattacctatacaggctgcctgtcccaggtgtgttttgtattgatttttggtggcttagaaagttgtctacttgctgtgatggcctatgaccgttacttggccatagttcatcctctgaggtatacagttatcatgaatccttgtctctgtgtactgctcgttttactttcattgtttatcagtaccattaatgcactactgcatagtctgatgttgttaaaactgtctttctgcaaagaccagaatatccttcatttcttctgtgaacttgttcaagtcatcaaacatgcctgctctgatactttcatcaatacccttcttatttacacagtgactagtgtatttgctggtgttcctcttgctgggattattttctcttatattcaaattgtgtcctccattcttaagatatcatcagtccagggacggaataaagccttttccacttgcggatctcatctctcagttgtatctttattctatgggacagcttttggagtgtatatgagttctgcagtttctgattcttctgttaagaatatagtcttttctatgatgtatactgtggtccctcaaatgctaaaccctttcatatacagtctgagaaacagagaaatgaagcaagccatgagacaccttctctttcctgtggtcttatcatctccataa

SEQ ID NO: 574 - DNA, 948 bp, Mus musculus
  MOR152-1
atgtctaacatggaagttgaaaacaaatcagttgttttggatatttttctacatggactcacaaatgacccagagctgcagccattcatctttgttctttttctaagcatatacttgattaccgtttctggaaatcttcttataatgttggccatcaagtgtgacttccatcttcacaaccccatgtacttctttctctgtcatctgtcttttaatgacatgtatttaatcagcatcacagtcccaaagatgttgatgaatatacaaacaaaagatcagaggataacttttgctggctgcctcagccaggcctgctttgttgtagtttgtacaatatttgaatgttttctccttggagtaatggcttatgatcgctacatagccatttgttatcctctaagatacacagtccttatgaaccccagtttctgtgttattctggttcttttctctctattctttagtattgtaaatggtctgctgcatagtctgatggtgctgtacttgtccttctgcacagacctggaaatcctccacttcttctgtgaaattgcacaaatcctgaagcttgcctgttctgacagcctcatcaacaacatcctgatatttgttacagcttctatttttgctggtcttcctctgtttgcaataatcttttcttatactcatattgtgtctacagtattgaaaatgccatcatcagaaggaaagtacaaagccttttccacctgtgggtctcatttgtcagttgtttccttattctatgggacagggtttggtgtatacattacctcaaaagtaattgattcaccaaagaagattgctgtggcttcagtgatgtattcagtagttcctccaatgttgaatccctttgtctattgtttgaggaacagggatatgaaggaggccctgaagaaagttattggtaggacagcttctcttctgtga

SEQ ID NO: 575 - DNA, 939 bp, Mus musculus
  MOR152-2
atggaagttaaaaacaagtcggttgttttggatattttccttcatggactcacagatgacatagagctgcagcccttcatctttggcttctttttatgcatgtatttgatcaccatctttggaaatcttcttataatgttagccatcatttgtgactcccacctccacaaacccatgtacttctttctctgccatctggcttttaatgacatgtatttaatcagcattacagtcccaaagttgttggtgaatgtacaaacacaggatcagaggatcactttagctggctgtctgagccagggatgctttgtggctgtatgtttcatctttgaatgttttctccttggaataatggcctatgaccgctacatagccatttgttttcctctaagatacacagtcctcatcaatcccttcttctgtgttattgtggttctaatctctctatttattagtattgtaaatggtctgctgcatagtctgatggtgctgcacttgtccttctgcacagacctggaaatcctccacttcttctgtgaaattgcacaaatcctcaagcttgcctgttctgacaacctcatcaacaacatcctgatatttgttacagcttctagttttgctggtgttcctctatgtggaataatcttttcttatgttcacattgtttctacagtattgaaaatgccatcatcagaaggaaagtataaagccttctctacttgtgggtctcatttatcagttgtttcattgttttatgggacaggttttggtgtatacattacctcagtagtaattgattcaccgaaggaaattgctattgcttcagtgatgtattccatagttcctccaatgttgaatccctttgtttatagtttgaagaacagggatatgaaagaagcactgaagaaggtaattggtagaacagtttctcttccatga

SEQ ID NO: 576 - DNA, 954 bp, Mus musculus
  MOR152-3
atgtgcaaaatggaagttgaaaacaaatcagttgtttttgatatttttcttcatggacttacagatgatacagagcttcagccctttatctttggcctttttctatgcatgtatttgatcaccatctttggaaatcttcttataatattggccatcatttgtgactctcacctccacacacccatgtacttctttctctgccatctggcttttaatgacatgtatttaatcagcattacagtcccaaagatgttggtgaatatacaaacacaggatcagaggatcacttttgctggctgcctgagccagggatgctttgttgctgtttgtaccatctttgagtgttttctccttggaataatggcctatgaccgcttcatagccatttgttatcctctaagatacacagtcctcatgaatccctgcttctgtgttattctgactcttatctctctattctttagtattgtaaatggtctgctgcatagtctgatggtgctgcacttgtccttctgcacagacctggaaatcctccacttcttctgtgaaattgcacaaatcctcaagcttgcctgttctgacagcctaatcaacaacatcttgatatttgttacatcttctatttttgctggtgttcctctatgtggaataatcttttcttatgttcacattgtttctacagtgttgaaaatgccatcattagaaggaaagtacaaagccttctccacgtgtgggtctcatttatcagttgtttccttgttctatgggacaggttttggtgtatacatttcctcaaatgtaattgattcaccaaagaagattgccatggcttcagtgatgtattcaatagttcctccaatgatgaatccctttatctatagtatgaggaacaggaatatgaaagaggcattgaagaaggtaattggtaggaagcttcttttctctgatgtgtga

SEQ ID NO: 577 - DNA, 888 bp, Mus musculus
  MOR145-1
atgggactctcagatgacctgcagcttcagcctatactctttggactgttcctgtccatgtacctggtcacgctgcttgggaacctgctcatcattctgacagtcagctctgattcccacctccacagtccaatgtactttttcctctctaacttatccttggctgatgtcagtttcacttccaccacactaccaaagatgatagtggacattcagactcacaacagagccatctcctattcaggatgcctgactcagatgtcctttttcatgctgtttgggtgtttggatagtctgcttctaactgcaatggcttatgataggtttgtggccatctgtcatcctttgcactaccagttcattatgaaccctcgtctttgtggcttgttggtttttctatctgttctaatcagtctttttgtctctcagctgcataattcagtagtattacaacttacctacttcaagagtgtggatatttcccatttcttctgtgatccgtctcaacttctcaaccttgcctgttctgatacctttaccaataacatagtcatgtattttgttggtgccatctctggttttctccctatctctggaatttttttctcttattataaaattgtttcctccattcttagaatgccatcacctggtgggaaatataaagccttctctacctgtggctctcacctgtcagttgtttgcttattttatggaactggtcttggggtatacctcagttcagctgtgtccttgtctcccaggaagggtgcagtagcatcaatagtgtacactgttgtcacccctatgctcaacccctttatctacagcttaagaaaccaggacataaagagggccatgtggcggctcctcagaaaaacagtctaa

SEQ ID NO: 578 - DNA, 921 bp, Mus musculus
  MOR146-1
atggaaccatataatttaacaggtgccttggaattcctgttacttggtctctcagaggaccctgaactgcagcccgtcttatttgcactattcctgctcatatacctgctcactgtgcttggaaatgtgctcatcatcttggccatcagctctgattcccacctccacagcccaatgtacttctttctctacaacctttcattgtctgacatgggcttcagcagcactaccatccccaaaatgctgataaacatgcagacccataacaaatcgataacgtatgcagcctgcctaactcaggtgtctttcttcactctttttgggtgtatggacagcctactactgactgtgatggcctatgaccgatgggtagccatttgtcgccctctatactaccaagtcattctgaaccccggcctgtgtagacgtttggtcctcatgttatttttcattagctatatgaattcactggtacactacttcatagtttcacaactaaaattctgcactaatatggaaatccctcatttcttctgtgatattccagagcttctaaaacttgcctgttctgacacctctatcaataatttattcaggtttcttttaagcatcatttttggttttctccctgtctcagggatcttttactcatactataaaattatttcctccattattagagttccatcattgttagggaaatataaagcattctctacctgtggatctcacctgtcagttgtttgcttattttatggaacaggtcttgaagcataccttagttcaactatttctagatcaaccagggaaaatatgctggcttcagtaatatataccatgagagttcccatgataaaccccttcatctacagcctgaggaacagggccatgaaaaaggccctccagaaaattttcagctga

SEQ ID NO: 579 - DNA, 960 bp, Mus musculus
  MOR145-2
atgttcattttcaaaagctgttcaaacaatatagaacttcaaaacctaacactagtctcagaattccatctcatgagaatctctgatgatccagaactgcagcccattctcttcgggttatttctgtctatgtacctggttacagtgcttggtaacctgatcatcatcctggctgtcaactctgactccaacctccacactcccatgtacttcttcctctgcaatctgtccttggctgacatctgttttatctctaccacagtcccaaagatgattgtgaacatccaaactcacagcaaagagataatctatgtgggatgccttacacagatgtcatttttgatcctttttggatgtatggatggcttgcttctgactgtgatggcctatgatagatttgtggctgtctgtcacccactgcattactcactcatcatgaatcctcgcctctgtggctctttagtttgcctgtctcttttgattagtcttgtggattctcaggcacacaatctcattgccttacaaatcatctacttcaaggatgtaaaaatttcaaatttcttctgtgaccctgcacaactccttaatcttgcctgttttaacacattcattaataacatagtcatgtattttgttggtgctatatctggtttacttcctatatctggaattttcttctcttattataaaattgttttctccattctgaaaataccatcgaaaggtgggaggtataaagccttctctacctgtgggtctcatctgtcagttgtttgtttattttatggaacagccattggagtatatcttggttcagctgtatcacattctcccagaagtactgcagtggcctcactgatatacactgtggtcactcctatgctaaatcctttcatctatagcttgaggaacaaggacattaaaagagcagtgaagagacttcacagaagaatgttgtaa

SEQ ID NO: 580 - DNA, 888 bp, Mus musculus
  MOR145-3
atgagcctctcagagaatgtagaactacagcctttcctacttgtgctgtttttatccttctacatggtcacagtgcttggaaatctgctcatcattctggccgtgtgctctgacttccacctccatacccccatgtatttctttctctccaacctttcctggtctgacatttgtttgatctccactatagtcccaaggatgatttgggatattggaactcaaagcagagtcatctcctatgtgagctgcctaacacagatgtccatgtttatagtttttggatgtatggatagtatgcttctgactgtaatggcctatgataggtttgtagccatctgtcaccctctgcattacaaaatcattatgaatcctaacctctgtgcattcttacttttagcatctgttttggccagtcttgtggactctcaggtgcacaatttgattgtactgcaatttacatatttcaatgacatggaaatctctaacttcttttgtgacccttcacaacttcttaatcataactgttctgaaatgttcaccaaaaacatagttatacattttattggtgtcttttttggtttattttcaaccacaggaattattttctcatactataaaattatttcttccatcctgagaattccaacaaaagatggaaagtataaagccttttccacctgtgggtctcacctgtcagttgtttgcttattttatggaacatccattggagtatacattggttcaactgcatcgaattcccctaaaaactgtgcaattgcttcactgatgtacacagtggtcacacctatgcttaatcccttcatctacagcctgaggaacagggacattaaaactgctctttggcagctgcagagaagagcaatgtaa

SEQ ID NO: 581 - DNA, 930 bp, Mus musculus
  MOR145-4
atgatgaaactaaaaatggaaaacataacatatgtttcacaattttatcttctgagagtatctgatgatccagaactgcagccctttctcagtgggttgttcctttccatgtacctgatatcagtccttgggaacctcatcatcatcctgattgtcagctcgttctcccacctccacactccgatgtatttcttcctctccattctgtccttggctgacattggcttcatttctacaacagtcccaaacatgattgcagagcttcaaatccacagtccagtcatatcctacgtgggctgcctcactcagatgtctctttttatcatttttgcatgtatggatagtatgcttctggctgtgatggcatatgacaggtttgtggccatctgtcacccattgcgttatgcaataatcatgaatccttgtcgctgtggcatcttagttttaatgtctttttctgctagcctttttgagtccctgcttcacaatttggttgccttacaacttaagtgtttcaaagatgtggcaattgccaatttcttctgtcacccttctcaacttctaaatttaagttgcaacaacacatttaataataacatactcatgtatgttattggtgtcatacttggtgtttttcccttatcagggatccttatttcatactttaaaatcatttcttctattctgagaatcacctcttcaagtgggaggtataaagctttctctacctgtgggtctcacctcgcagtggtatgcttattttatggaacagggcttggagagtattttggctcacttttgtctcattcttctggaaacaatgtggtggcctcattaatgtacactgtggtcacccccatgctaaatcctttcatctacagtctgaggaatcaggacattagtgattcccttaaaaggctccacttttga

SEQ ID NO: 582 - DNA, 939 bp, Mus musculus
  MOR145-5
atgattaataatgatgtagagaatttaaaagatgtcttggaattccatctcatggcactctccgaggatccagaactgcagcttctcctctttggattattcctgtccgtgtacctagtcacagtgcttgggaatctgctcatcatcctgatcatcatctttgactcaaacctccataaccccatgtactttttcctgtccaacttatctttgattgatatcttattcatctctactaccatcccaaagatgattgtgggcatcaaaatgcacagcagggtcatttcctatgcaggctgcttgacacaaatgtctcttttcctattttttgtatgtatggatgacatgattctaaatgtgatggcttatgaccgatttgtggccatctgtcatccccttcattacacagtccttatgaaccctcaggtctgtgttatcttaattttgttgtctttttcagtcagtgtttttgattcacagctgcacaatttgattgccttacaagatacttgcttccgggatgtggaaattgcaaatttcttctgtcacccttcccaactccttaatcttgcttgtactaacacactcagcagtaacatagtaatatattttattggtgtcatacttggcatttttcctgtcctaggaatcattttatcatactgtaaaattgttttctccattctgaaaatcccctcctcaagtgggaaatataaagcgttctccacctgtggttcacatctgttagtagtttgcttattttatggaactgggattggtgtgtaccttgggtcagctgtgtcacattctccacgaaagaatgcagtggcttcactgatgtacactgcagtgagccctatgcttaatcctttcatctacaccctgaggaatagagatatcagtaatgccctgaagagattccacagtaggttttcctaa

SEQ ID NO: 583 - DNA, 888 bp, Mus musculus
  MOR145-6
atgagcctctcagagaacgtagaagtacagcctttcctacttgtgctgtttttatccttctacatggtcacagtgcttggaaacctgctcatcattctggccgtgtgctctgacttccacctccatacccccatgtatttctttctctccaacctttcctggtctgacatttgtttgatctccactatagtcccaaggatgatttgggatattggaactcaaagcagagtcatctcctatgtgagctgcctaacacagatgtccatgtttatactttttgcatgtatggatagtatgcttctgactgtaatggcctatgataggtttgtagccatctgtcaccccctgcattacaaaatcattatgaatcctaacctctgtgcattcttacttttagcatctgttttggccagtcttgtggactctcaggtgcacaatttgattgtgctacaatttacacacttcagtggcatggaaatctctaacttttattgtgatccttcccaacttcttaatcttaactgttctgaaatgttcaccaaaagcatagttatacattttattggtgtcttttttggtttattttcaaccacaggaattatttcctcatactataaaattatttcttccatcctgagaattccatcaaaagatggaaagtataaagccttttctacctgtgggtctcacctgtcagttgtttgcttattttatggaacagctactgcagtatacattggttcaacctcatcatattctcctgaaaactgtgcagttgcttcactgatgtacacagtggtcatacctatgcttaatcccttcatctacagcctgaggaacagggacattaaaattgccctacggaagctgcagcgaagggccatataa

SEQ ID NO: 584 - DNA, 936 bp, Mus musculus
  MOR108-1
atgaaaaatcgaacatctgtgagtgagtttattcttttgggattgacaagtgatccaaagctaaacattttgatttttatatttttatttatcacttatattttgagcattactggaaatctgaccattattaccctcactctgatagattcacacctcaagacacccatgtacttttttcttcgaaatttctcattcctagaaatctcatttaccacagtttccattcctcgcttccttgtgagcattgtgacaggagatatgaccatctcctataactcctgcatggctcaggtgttcttcttcatactcttgggttcaactgaatttttccttctgactgctatgtcctatgaccgctatgtagctatctgtaagcccttgcattacaccacaataatgaacagtagagtctgcatgcagctcattgtgagctcttggctggctggatttctcatcatctttccacctgtgatcatgggccttcaactggatttctgtgactccaacattattgaccatttcacctgtgactcctcccccttgctgctcatctcttgcacagacacagccttcctggagctcttggcattcttcctggcagtatttactctcatggtaaccttaacattagtaattctgtcctattccttcatccttaggacaattctaagaattccctctgctgagcaaaggaaaaaggccttttctacatgttcatcacacatgattgttgtgtccatttcctatggaagctgtatattcatgtatgtaaaaacttcagcaaaggaaggagtggctttgactaagggtatagcagtgctcaacacctctgttgccccaatgctgaatccttttatttactcccttagaaacaaacaagtaaaagaatccttcaggaatttgatcaaaaaatgtatttcaaataaaatttaa

SEQ ID NO: 585 - DNA, 960 bp, Mus musculus
  MOR110-4
atgaagaaccagtcagtagagattgtgttcattttgctgggactgacagatgaccctcagctacaaattctgattttcctgtttatgtttttcaattacatcttgagcttgatagggaacttaataattatctttctcaccctgctggatcttcgcctcaagactccaatgtacttctttctccggaatttctccttcttggaaatggcattcacatcttcttgcattccacgattcttgatgagcattctcactggagacaaaacaatttcctatggatcttgtttaactcaattattcttcttctttctattactaatcacagagttctacctcctggctgccatgtcctatgaccgatatgtagccatctgcagaccactgcattatcccatcatcatgaatagcaaagtgtgccacctacttgtcctcagctcctgggtgacagggtttttatccatctttcctcctttaatgttgggactcaaactggatttctgtgcttccaaactgatagatcacttcttgtgtgacacttctcctgtcctccagctgtcttgcacagacactcgtttcatagaatggatggcttttgtcatagctataatgacacttatcatcaccttgatcttagttatcctctcctacacactcatcatcaaaaccatcctaaagttcccttcagctcaacaaaggaaaaaggccttttccacctgctcctcacacatggttgttgtctccatcacatatgggagttgtatcttcatgtacattaaaacatcagccaaggagagggtgagcttaaataaaggtgtagctgtgctcaacacctctgtggcccctttgctaaaccctttcatttacaccctaaggaaccagcaggtgaaggatgctttcaaacaggtgcttcaaagattgtgtcattctcaaaacagtgagttaagatttaggcatcaatag

SEQ ID NO: 586 - DNA, 927 bp, Mus musculus
  MOR111-3
atgaaaaactacactataattacagagtttgtgctcttgggaatatcaggcaacagagagcttcaggtagtaattttcgtctttttattaataacttacatagtaagcatcactggaaacctaaccattatcctcctcacattgttggactctcacttaaagactcctatgtattatttccttcgtaatttctccttcttagaaattatgttcactagtgtttccattcccagattcctggcatcaataattacccaagtcaagaccatttcctataataattgttttgctcagttatttttcttcatcttcatgggggtgacagagttttttcttctaaccgctatgtcttacgatcgttatgttgccatctgcaagccactgcactacaccctcatcatgaatcagaaagtctgcacccttcttgtcctcacctcatggctggcaggattcctgaccatcttcccaccacttatgctggtcctaaagttagatttctgtgcttccaatgtcattgatcacttctgctgtgactattttcccctcttacaactgtcttgctcagatacttggctcctagaagtgattggtttctatgttgctctggttactctactgttcacattggcattggtgattttatcttacatgtacattttcaggactattttaagaattccatcagccaatcagaggaaaaaggctttctccacctgttcctcgcacatgattgtcatctccatgtcttatggaagctgtatatttatctatgtgaagccttcagcaaatgaaagagcatcattgaccaaaacagtagctattctcagcacttcagttgctcccatgttgaacccttttatttatactttgaggaaccagcaagtaaaacaagctttcaaagacttgattcataaggtagttttttag

SEQ ID NO: 587 - DNA, 942 bp, Mus musculus
  MOR110-5
atgaaaaaccagtcagtagagattgtgttcattttgttgggattgacagatgaccctcagcttcaaattctgattttcctgtttatgtttttcaattacatcttgagcttgatggggaacttagtaattatcttcctcaccctgctggatcttcgcctcaagactccaatgtacttctttctccggaatttctccttcttagaaattgcatttacaactgcctgtattccacgattcttgatgagcattctcactggagacaaaacaattacctacaatgcttgtgtagctcaattgttcttcttttttctactacttatcacagagttctacctcctggctgccatgtcctatgaccgatatgtagccatctgcagaccactgcactaccccatcatcatgaatagcaaagtgtgccacatactggtcctcagctcctggatgacagggtttttatccatctttcctcctttaatgttgggactcaaactggaattctgtgcttccaaaactgtagatcacttcttgtgtgacacttctcctgtcctccagctgtcttgcacagacactcgtttcatagaatggatggcttttgtcatagctataatgacacttatcatcaccttgatcttagtgattctttcctacacactcatcatcaaaactatcctaaagttcccttcagctcaacaaaggaaaaaggccttttccacctgctcctcacacatggttgttgtctccatcacatatgggagttgtatcttcatgtacattaaaacatcagccaaggagagggtgagcttaaataaaggtgtagctgtgctcaacacctctgtggcccctttgctaaaccctttcatttacaccctaaggaaccagcaggtgaaggatgctttcaaacaggtgcttcaaagattgtgtcattatcaaacagtaaattga

SEQ ID NO: 588 - DNA, 960 bp, Mus musculus
  MOR110-6
atgaagaaccaatcattgaagatagagtttattttgcttggtctgacagatgaccctcagctacaaattccaattttcctgtttctgtttttcaattacatcttgagcctcatggggaactacatgatcatcttcctcaccctactggatccccatcttaagactccaatgtatttctttctccggaatttctctttcttagaaattgcattcaccacagtgtgcattcccaggtttctgataagcattctctcaggagacagaacaatttcctacaatgcttgtgcagctcaattatttttcttttttttactaggaagcacagagttttaccttctggctgccatgtcctatgatcgctatgtagccatctgtagaccactgcactaccccatcatcatgaatagcaaagtgtgccaccaactggtcctcagctcctgggtaactgggttcttagttgtatttccaggtttgctcttgggactcaaactagatttttgtgcctccaaaacaatagaccacttcctgtgtgacagttctcctctcctgcaactgtcttgcacagacacccattttattgagttattggatttcgctttagctgttatgacacttgtgatcaccttgatcttagtgattctctcctatacactcatcatcaaaaccattctaaagttcccttcagctcaacaacggagaaaggccttttccacctgtacctcccacatggttgttgtctccattacttatgggagttgtatcttcatgtacatgaaaacatcagccaaggagagggtgactttaaataaaggtgtagcagtgctcaacacttctgtggcccctttgctaaaccctttcatttacaccctaaggaatcagcaggtgaaggaagctttcaaacatgtgcttcatagattttgctctctacaaaacagtgagacaaggtttagacataaataa

SEQ ID NO: 589 - DNA, 936 bp, Mus musculus
  MOR111-4
atgaatcacacagaaattacagaattcatcctcttaggcctttctgatgaccctgaccttcagattgtgattttcctctttttattaatcacatatatgttaagtgtcattggaaacctgactatcattgttttgaccttcatagacacccatctacaaacaccaatgtatttcttcctccggaattttgctttcttggaagtctcatttacaagtgtatgtatccctagatttctggggtctattgtcacccggaataagacaatttcctataacaactgtgctgcccaactctttttctttatcttcatgggtgtgtgtgagttttacattctcactgccatgtcctatgaccgctatgttgccatctgtaagccccttcactacacaaccatcatgaacaggaaactctgcaccttgtttgtgttgtgtgcctggctggctggttttctgactgttttcccacctcttatgcttttgctccagcaggattactgtgcttctaatgtcattgatcattttgcatgtgacttttttcccctcttgcaactgtcttgctcagatacattgtttctagaagtaattggcttctatgttgctctggttgctcttctgttcactttggcattggtgattttatcttacatgtacattatcaggactattttaagaattccatctaccagccagcggaaaaaggctttctccacctgttcctctcacatgattgtcatctccctctcttatggaagctgtatattcatgtatgctaatccctctgcaaaagaaaaggcctcattgaccaaaggcgtggcaattctcaatacctctgttgtccccatgttaaatcccttcatttatacactaaggaaccagcaagtaaagcaagcattcaaaggtgcagtacacaaactagtattttctgtaagcaaatga

SEQ ID NO: 590 - DNA, 939 bp, Mus musculus
  MOR113-4
atgaagaaccatacaagagtgacagttttcatcatagcaggtttgactgatgacccacagtggaaagttgtgttattcatcttcctgcttcttacctatctgctcagcatcactggcaatctggccatcattacactcaccctggtggatactcacctgaagacacccatgtattttttccttcggaatttttccttcttagagttttcctacactactacatgcatccccaaattgcttgttactatggcaacaggtgacaaaaccatttcctatggtaattgtttgactcaagtgttttttgctttcttatttggagcatcagaattttatttgctggcagccatgtcctatgacagatatgtagccatctgcaagcccctgcactatatgaccatcatgaacaataaagtctgtgtgcagctggttctcagttgttggcttgctggcttttttgtcatctttccaccactgctgttaggcttgaatcttgacttctgtgcttccaacattgttgatcatttctactgtgacacaactccactcttgcagctttcctgcacagacacacagctcctggaaacaatgggatttgtctcagctttggtaacactcttactcacactggtaatggtgatcgtatcctacatttacattgctataacaattctaaaaatcccttcagccagccagaggaagaaggctttctctacatgttcttctcacatgattgtaatatccctttcatatggcagctgcatcttcatgtatgttaaaccatcagtcaaacagagagtatctatttccaagggaatttctgtgctcaacacctcagtggctccacttctgaatccttttatctacaccttgaggaatcagcaagtgaaaaaggcattcattaatacagtacacaggattgtgtctttctcaaagaaatga

SEQ ID NO: 591 - DNA, 939 bp, Mus musculus
  MOR111-5
atgagaaaccatactgaaactacagagtttattcttctgggattgtcagatgacccaaagctccaggttgtgatctttgtctttctcttcatcacctacacactcagcatcacagggaacctgaccatcatcactctcaccttgctggattctcacctccagactcccatgtatttcttccttaggaattttgcaacattagaagtatccttcacaactgtctgtataccaaggttcttgggcaccattatctcaggggataaaacaatttccttcaacaactgcatagctcagttattttttcttattctatttggagttactgaattttaccttctagctgccatgtcctatgaccggtacatcgccatttgcaagcccctgcattacctgaccatcatgagtcagaaggtctgcaaaatgttggtctttgcctcctggctggtttctttcctaatcatcttccctgcactgatgttacttctacagcttgattattgtgtgtccaatatcattgatcactatacctgtgattatttccctctgcttcaactttcctgttcagacacaaagttcctggagaagatggggttttcttgtgctgtctttaccctaatgttcactttggcattagtattttggtcctacacatacatcatcagaacaattgtgaagattccttctgccagtcagaggtcaaaggccttttccacatgctcttcccacatgattgtcatctccatctcttatggcagctgcatttttatgtacataaaaccctcagcagcagatagagcatcattgaccaagggagttgccatactaaatacctcagtcgcccccatgctaaaccccttcatttatagcctgaggaatcagcaagtccggcaagcgtttatgaacatggcaagaaagatggtgtttttcacaagtaaatga

SEQ ID NO: 592 - DNA, 936 bp, Mus musculus
  MOR114-7
atgagaaaccacaccataacaacattcatcctactgggactgacggatgacccacaactgaaaactctgatcttcatctttctgtttctcagctacgtgctgagtatgactgggaacctcacgatcatatcccttacctttatagatccacacctaaagactgctatgtactttttcctacaaaatttctccttcctagaaatctcatttacaactgcttgcattcccagatacttatacaacatctcaacaggtgacaagacaattacatataacaactgtgccattcaaatattttgtgttgatctttttggtgtgacagaattttttctgctggccatcatgtcctatgaccgatatgtagccatctgcaaacccctgcattatagcaccatcatgagcagcaggatctgtacaagacttatcctctgttgctgggcagctggcttgtttgtaatcctgccaccacttagcctgggcctcaagctggaattctgtgactctaatgttattgaccattttgtctgtgatgcaaaccccctcctaaagatctcatgtacagaaacatggctcatagagcagatagtgatagtttgtgcagtgtttacatttatcatgacccttgtgtgtgtaagcctttcctatatatacataatcaggaccattctaagatttccttctgcacagcagaggaaaaaggccttttctacctgctcttcccacatgattgtggtttccatcacctatggcagctgcatcttcatctacatcaaaccatcagcaaaggactcagtgactatcaacaagggtgtgacgattctcaccacttccattgctcctatgttgaacccattcatttatacattgaggaacaaacaagtcaagcaggccttcaatgactcagttaaaagaattgtgctgttcttccagaagtag

SEQ ID NO: 593 - DNA, 954 bp, Mus musculus
  MOR114-8
atgaaaaacaacacaataaccaccttcattctgctgggactaacagatgatcctcaacttcagattccaatttttgtgtttctattttttgcctacatgctcagcataactgggaatctgactatcatatccctcactatattagactcccaccttaaaacacccatgtacttttttctacaaaatttctccatattagaaatttcatttacatctgcttgtattcctcgatatttgtacaacatagcaaccggagacaggtcaatcacttataatgtttgtgtcattcaagtgttttttactgatgtttttggagtaattgaattttttcttctggccattatgtcctacgatcgatatgtggccatctgcaaacccctacattatgtaaccatcatgagcagcaaggtgtgtcagacgcttgttctctgctgttggtcggctggcttgctcatcatactcccaccactcactctgttcctaaacttgagattctgtgactcaaatgttattgattatttcttctgcgatgcatctcctatcttgaagatttcctgctcagacacttggctcatagagcagctggtgattgtctgtgcagtgctgaccttcattctgacccttgtgtgtgttactctgtcctacgtacatatcatcaagaccattctgagattcccctctgcccagcaaaggaaaaaggccttttctacctgttcttctcacatgattgtagtttcaatcacctatggaagctgtattttcatttacatcaacccttcggcaaaggaatcggtggccatcaataaaggtgtggctgttctgatgacatcgattgctcccatgttgaacccatttatttatactctgagaaataagcaggttagacaagccttcagtgattccttcaaaaagattgccattatctcaatgaagaaagagaatgttcaaatatag

SEQ ID NO: 594 - DNA, 939 bp, Mus musculus
  MOR111-6
atgagaaaccactctatggttaccgagtttttgctctcaggcatatcagacacaccagaagtccaggttgtgatttttatccttttattcattgcttatatattaagtgtcactggaaacctaaccatcatcactctcaccttgctagattcccagttaaagactcctatgtactttttcctccagaatttctccttcttagaaattatattcaccagtgtttctgtccctagatttttgggatcaataattactgaagtcaaaacaatttcctataacaactgtttgactcaattatatttcttcctttctctgggagtgtctgagttctttcttctaactgctatgtcttatgatcgctatgtagccatctgtaagccactgcactatgttatcatcatgaatcagaaagtctgcacccttcttgtcctcacctcatggctgataggatttctgagcatcttccctttaatcatgcttatccacaagttagatttttgtgcttccaataccattgatcacttctgctgtgactacttccccattttacagctgtcttgctcagatacaaggcttttagaggcatttggcttttattgtgcctccattactctgctgttcacactggctctagtgatcttgtcatacatctgcatcatcaacaccattctgaggttcccatctgccagtcagaggaaaaaggctttctccacctgttcctctcacatgattgtcatctccatctcttatggcagctgcattttcatgtatgtcaaaccttctgcaaatgaaagagcatcactgaccaaaggggtggctgttctcaatacttcaattgctcccatgctgaacccttttatttacaccttgagaaatcaacaagtaaaacaagccttcaaggattttattaataaagtaatgtttaatagaaacaaatga

SEQ ID NO: 595 - DNA, 939 bp, Mus musculus
  MOR111-7
atgagaaaccactctatggttactgagtttgtactcttgggcatatcagacacaccagaagtccaggttgtgatttttatccttttattcattgcttacatattaagtgtcactggaaacctaaccatcatcactctcaccttgctagattcccagttaaagactcctatgtatttcttcctccagaatttctccttcttagaaattatattcaccagtgtttctatccctagatttttggagtcaataattactaaagtcaagactatttcctataacaactgtttgactcaattatatttcttcctttctctgggagtgtctgagttctttcttctaactgctatgtcttatgatcgctatgtagccatctgtaagccactgcactatgttatcatcatgaatcagaaagtctgcacccttcttgtcctcacctcatggctgataggatttctgagcatcttccctttaatcatgcttatccacaagttagatttttgtgcttccaataccattgatcacttctgctgtgactacttccccattttacagctgtcttgctcagatacgaggcttttagaggcatttggcctttattgtgcctccattactctgctgttcacactggctctagtgatcttgtcatacatctgcatcatcaacaccattctgaggttcccatctgccagtcagaggaaaaaggctttctccacctgttcctctcacatgattgtcatctccatctcttatggcagctgcattttcatgtatgtcaaaccttctgcaaatgaaagagcatcactgaccaaaggggtggctgttctcaatacttcaattgctcccatgctgaacccttttatttacaccttgagaaatcaacaagtaaaacaagccttcaaggacttgattaataaactaatgtttaatagaaacaaatga

SEQ ID NO: 596 - DNA, 936 bp, Mus musculus
  MOR114-9
atgagaaaccacacagtaacaacattcatcctactgggactgacggatgatccacaactgaaaactctgatcttcatctttctgtttctcagctatatgctgagtatgactgggaacctcacgatcatatcccttacctttatagattcacacctaaagactgctatgtactttttcctacaaaatttctccttcctagaaatctcatttacaacagcttgcattcccagatacttatacaacatctcaacaggtgacaagacaattacatataacaactgtgtcattcaaatattttgtactgatctttttggtgtgacagaattttttctgctggccatcatgtcctatgaccgatatgtagccatctgcaaacccctgcattatagcaccatcatgagcagtaggatctgtgcaagacttatcctcagttgctgggcagctggcttgtttgtgatcctgccaccacttagcctgggcctcaagctgaaattctgtgactctaatgttattgaccattttgtctgtgatgcaaaccccctcctaaagatctcatgcacagaaacatggctcatagagcagatagtgatagtttctgcggtattaacatttatcacgacccttctgtgtgtaagcctttcctatatatacataatcaggaccattctaagattcccttctgcccagcagaggaaaaaggctttttctacctgctcttcccacatgattgtggtttccatcacctatggaagctgcatcttcatctacatcaaaccatcagcaaaggactcagtgactatcaacaagggtgtgatggttctcaccacttccattgctcctatgttgaacccattcatttataccttgaggaacaaacaagtcaagcaggccttcaatgactcagttaaaagaattgcgctgttcttccagaagtag

SEQ ID NO: 597 - DNA, 942 bp, Mus musculus
  MOR256-10
atgagtgtggccaatgagagcatctcacgggagttcattctcttagggttttcagatcggccatggctggagctgccgctctttgtggtatttctagtgtcctatattctgaccatctttggaaatatgatgatcattcttgtgtcccgcctggattccaaactccacacccccatgtactttttcctcactaacctgtccttgctggacctgtgctacaccacaagcacggtcccacagatgctcatcaacatctgcagcacccggaaggtgatcagctatggtggctgtgtggcccagcttttcattttcctggctttgggttgcacagaatgctttctgctgggcgtcatgtcctttgacaggtttgtagccatctgtcggcctctccactactcagtcatcatgcaccagaggcgctgcctccagttggcggctgcatgttggatcagtggcttcagcaactcagtattacagtctacgtggacccttcagatgccactatgtggtcacaatagagtggatcacttcctctgtgagatccctgccctgctcaagttgtcctgtgtggatacaacagcaattgaaagtgaacaatttttcataagtgttgtcttccttttaatacccgtgaccctcatcctcatatcatatgcttttattgtccaggcagtgttgagaataagatcagctgaaggtcggcgaaaggcatttgggacatgtggctcccacctcatcgtggtggtccttttctatggcactgccatctacatgtatctgcagccaccatcccctacttccaaggaccgggggaaaatggtgtctctcttttatgggatcatcacacccatgctgaaccccctcatctacacactcaggaacaaagaggtaaagggagcgttcaagaggttggtgacaaggatcatcctgagtagaaaataa

SEQ ID NO: 598 - DNA, 942 bp, Mus musculus
  MOR256-11
atgagttgggcaaacgagagcatcacaggcgagtttgttctcttaggtttctctgatcaaccatggctggagtttccactctttgtggtcttcttgacatcttacatagtgaccatctttggaaatctcaacattattctggtgtcccatttggatcctaaactccacactcccatgtacttcttcttgactaatctgtcagtcatagatctttgttacatcacatgcacagtcccacaaatgctggtaaacttacgcagcattaggaaagtaataagttttggtggctgtgtggtccagcttttcatgtttctggcattgggggctaccgagtgtgttctactgccagtcatgtccttcgacaggtttgtagccatatgtcggcctctccattactcagtcattatgcaccagaggctctgccttcagttggcggctgtatcctggatcattggctttggaaactcggtgtggctatccattctaactctccagttgccacgctgtggccactatgtcatagaccactttctttgtgaagtgcctgcactgctcaagttgtcctgtgttgatgtaacagcaaatgaagctgaactgttctttgtgagtgtgttcttccacctaacacctctctctctcatccttacatcatatgcatttatagcccgtgccatcttgaaaatccaatctgccgaaggtcgtcaaaaggcgtttgggacctgtagctctcatctaatagtggtatcactgttttatggtacagctctctccgtgtaccttctaccaccatcaccacactccaagaacaggagaaagatggtgccacttttctatggaattattgcccccatgctgaacccccttatctatacacttaggaacaaagaggtaaaggacgcctttaaaaggttgatcaagagagtcttcttaagcaaaaactaa

SEQ ID NO: 599 - DNA, 954 bp, Mus musculus
  MOR256-12
atgtggttgcaagtgatggaaaaagaaaacacgagttcttttgaaggcttcatcctggtgggcttctctgaccgtcctcacctagaacttatcctctttgtggtagttctctccttttatctgctcactcttcttggcaacatgaccatcatcttgctttcagctctggattcccggctgcacacacccatgtatttctttctggccaacctctcattcctggacatgtgttttaccacgggttccatcccacagatgctctacaacctctggggtccagacaagaccatcagctatgtgggttgtgctatccaactgtactttgtcttagccctgggaggggtagaatgtgtcctcctggctgttatggcatatgaccgctacgcggctgtctgcaagcccctgcactacaccgtcatcatgcatcctcgtctctgcgggcagctggcttcagtggcatggttgagcggctttggcaattctctcatcatggcaccccagacgttgatgttgccccgctgtggacacaggcgggtggaccactttctctgtgagatgccggccctgattggcatggcctgtgtggacactatggccttggaagcactggcttttgcgttggcgatttttatcatcttggcaccgctcatcctcatccttatctcctatggttacattgcccgagcagtgtttaggatcaagtcagctgctgggcgacggaaagccttcaacacttgcagctcccacttaatcgttgtctctctcttctacggtaccatcatatacatgtacctccagccggcaaacacttactcccaagaccagggcaagtttctcactcttttctacaccattgtcactcctagtgttaaccccctgatctacactctgagaaacaaagatgtcaaagaggccgtaaagaaagtgctagggaaggggagcatagaagtatag

SEQ ID NO: 600 - DNA, 945 bp, Mus musculus
  MOR256-13
atgcatgcactgaccgttaatgccatgatcaaccagagctgccaggaacagttcatcctgctgggcttctcagacagaccgaggctagaatccatcctctttgtgtttgtcctcatcttctacctggtgactttagtgggcaacatcatcattatcttagtttcctatctggacccctgtcttcacacccccatgtacttcttcctcaccaacttgtcctttcttgacctctgtttcactaccagttccatccctcaattgctcttcaacttaggaggccaggacaagagcatcagttacattggctgtgcagtccagctgttcatgtttcttggcctaggaggtactgagtgtgttttgctggctgtcatggcttacgaccgtttcactgcaatctgcaagccccttcactactcggtcattatgcattctcagctctgctggacattggtgtctgtagcctggagtgtgggactcctcaactccctggtcatgtctcctgtgaccatgaagctgcctcgatgtggcagatgtcaggtgaggcacttcctgtgtgagatgccagctctgataaaaattgcctgtgtggacactgtggctgtggaaagcactgttttcattttatcggtgataatcgtgctggtgcctttgactctcatcctcatttcttacagctatattgctctagcagtgatgaggatcaagtcagcctcaggaaggaggaaggctttcaacacgtgtgggtctcacctcaccgtagtctccttgttttacgggaatatcatctatatgtatatgcagcctggacacaaggcttcccaggaccaagggaaatttcttaccctcttctacaacttggtaacccccatgttaaaccctgtcatctatacactgagaaacaaggatgtaaagggcgcactgaagaggcttgtgactacgaaataa

SEQ ID NO: 601 - DNA, 927 bp, Mus musculus
  MOR282-1
atggggacttcaaatgtgtcatcaaattcagatttcatcctcatggggctcttgagctacacagggccccatcttgtcttgttcttcctcatggccaccgtgttcatcattggcctgctaggcaacaccaccctgctttttctgattgccacagactccaggctccacacacccatgtacttcctgctcagccaactctcacttctggatgtcggcttcccactggttaccatccccaaagtggtggctgagttcctgcaaggacagaatgtcataagctttgggggatgtgccactcagatgttcttcctcatgctcatgggtgtctctgagggtgtccttctgtccctcatgtcttatgaccgctacgtggccgtatgccaccccctgcattaccaggtgctcatgagaaaccaagtgtgtctggtgatggtgggtgcatcctggttctcaggtgccttggtggcatccatccagacctccatcaccctgcagttcccttactgtgcctcacacaccgtggaccacttcttctgtgagctgccagctctcctcaagctgtcatgtgcagacacatcagcctatgagttggcgctctccatctctggggtgctgatcttactgctacccctgtctctcatcttcatttcctacggccacgttctgggagctgtcctgctcatgcggtcagctgaagctagacacaaggctttcaccacgtgctcctcacatgtgactgtagtgggtctcttttttggggcagctgtattcatatacatggtcccaggcagctaccacagcccaaaacaggataatgtggtatccctcttctacagcctcatcacccctaccctcaaccccctcatctacagcttgagaaacagagaagttcgaatgtcccttggtcaaggttatgggcaggtctga

SEQ ID NO: 602 - DNA, 930 bp, Mus musculus
  MOR278-1
atgaagacccccagtaacagcacagaggcggacttcattcttctcggcctcttcagccacacacacgcccactcgctcctgctttctgttgtgttagtaatcttcaccgcctctctgatgggcaataccctcatgatccttctcatctgcagggaccccaggctgcacacgcccatgtatttccttctcagccagctctccctcatggacatgatgctagtctccaccattgtccccaagatggcagccaactacttgacgagcacgagatccatctcccctgcaggctgtggctcccagatcttcctcttcctcactttggcagggggcgagtgcttcctcctggcagccatgtcctatgatcgctacgtagccatatgctttcccctgcgctaccatgtcctcatgaaccccaagttgtgtgcatacctgacagtggggtcctggctcctgggagctgccgatggactgatgcaggcgggcaccatcctgagtttccctttctgccactctcgaacaatcaaccacttcttctgtgaggcaccttctctggtgcgcctcgcctgcgcagacaccaaagtctttgagttcttcatgtacatctgctgcattctgatgctcctgatcccgctgtccctcgtcctggcttcctactcgctcatcctggccacggtgctccgcatgcgatcctccgcagcccggaagaaagccttcaccacctgctcttcacacctggctgtggtggggttgttctacggggccatcatcttcatctacatgagacccaagtcccaccagccaggcaagagtgacaaagtggtgtctgccttctacaccatcttcacgccggtgctgaaccctctcatatacagtgtgagaaacaaggaggtcaagggagccttgaggaagtggctgcagaagacagtgtga

SEQ ID NO: 603 - DNA, 927 bp, Mus musculus
  MOR222-1
atgtccaatcacacaagagtgactcacttcatcctcaggggcttctcagatgtcccacagctgagattggtgctcatcccatttttcttgctcttttacactttcggcatcctggggaacttctccatcatcacggctgtgataagagacagtcggctccactctcccatgtacttcttcctgaagaatctgtctttcctggacatttgctacacctcagccaccatccccaaggcagtggtgatatccctcacaggctcaggggtcatctcctatcaagagtgtgtagcacagctctacatgtttatcacactctgtggtactgaatgctttctactcacggccatggcttatgaccggtgcctggccatcctcagaccactgatctatggaaccatcatgagccacaaatattgttctgcattggtggtcactgcctgggtgggtggggctatctactcagccttccatacatttaacaccttctccctcccctactgtggacccaatgttgttgatcacttcttctgtgacatgccaccagtcatgagactgtcctgcactgattaccatctcaatgaggaggtgggctttgctgtcattggctgcattatcatgagctccttcgccctcacagtggtctcctatattggcattgtggccacagttcttcgcatcccctcagtagaaggcaggtggaaagccttttctacctgctcctctcacctgaccacggtcatcttgttttatggaactggaagctttgtgtatctgaggcctgcctctcagtactccccgaccctggatcccctggcatctattttctactctgtagtcacaccatctctgaatccagttatctattgtctgaggaacaaagatatgaagtttgctctacagaaactttactgtgggagaaagtattga

SEQ ID NO: 604 - DNA, 927 bp, Mus musculus
  MOR222-2
atgtccaatcacacaagagtgactcacttcatcctcaggggcttctcagatgtcccacagctgagattgatggccataccagttttcttgctcatttacacatttggcctcctggggaacttgtccatcatcacggctgtgacaagagacagtcgactccactctcccatgtacttcttcctgaagaatctgtctttcctggacatttgctacacctcagccaccatccccaaggcagtggtgatatccctcacaggctcaggggtcatctcctatcaagagtgtgcagcacagctctacatatttctcacattctcttcttctgaatgctttctgctcacggccatggcttatgaccggtgcctggccatcctcagaccactgctctatggaaccatcatgagccagaaatattgctctgcattggtggtcactgcctgggtgggtggggccatctactcagcctttcatacattcaacaccttctccctcccctactgtggacccaatgttattgatcacttcttctgtgacatccctccagtcatgagactgtcctgcactgactaccatctcagtgaggaggtgggctttgctgtcagtagttgcattgtcatgagctcctttgccctcacagtggtctcctatattggcattgtggccacagttcttcgcatcccctcagtagaaggcaggtggaaagccttttctacctgctcctctcacctgaccacagtcatcttgttttatggaactgggagctttgtgtatctgaggcccgcctctcagtactccccaaccctgggtcgcctggcatctattttctactctgtagtcacaccatctctgaatccagttgtctattgtctgaggaacaaagatatgaagtttgctctacagaaactttattgtgggagaaagtactga

SEQ ID NO: 605 - DNA, 951 bp, Mus musculus
  MOR256-14
atgaacctaggtaatgaaagtgctccaaagatcttcattcttttgggtttctccagccatccatggctggaaatgcccctcttcataatggtgcttgttgcttacgtctgcacagtgctgggaaatatatcaattattgttgtatccaggagagaccctcaactggacagcccgatgtacttcttcctttccaacctctccttcttggacctgtgtttcaccacaaccaccatccctcagctgcttcggaatctttggggcccagataaatccatcagttatggaggctgtgtgacacagttttatatttttcacttcctgggggctaccgagtgcatcctcctggctgtgatgtctttggatcgttacattgccatatgcaagcccctaaggtacccagcgatcatgcaccagcaactctgtatcctcctcgtgtccatggcttggctgagtggcttggctaactctttgcttcaatcaaccctcaccgtcaagctgccattttgtggaaacaacaaagtagacaactttctctgcgaggtcccggtgatgatcaagatgtcctgtgctaacactgcattcaatatagctatgctctccattgtagggactttctactctctggttcccttgtcacttattcttatttcctatgggtttattgtagcaactgtgcttaggattcgttcctcagagggcaagaagaaagcctttaatacatgtggttctcatgttgttgtcgtgactcttttctatggaccagtaattagcatgtacgtacaaccctcatcttctaattcccaggacaagaacaaacttctgtctctgttctacagtttggtgactcctatgcttaacccttttatctatactttgaggaacaaggacatgaagggagcaatgaagagacttcttgtctcattgtatcacaagggagcggagcaaacataa

SEQ ID NO: 606 - DNA, 945 bp, Mus musculus
  MOR256-15
atggaaataaacaacaaaagctctgagacagacttcatccttctgggattttccagtcgaccccaactggagcacatcatctctgcagttgtctttgtcttctatattgtgactctggtaggaaacacaaccattattctagtgtcctatctggactctcagctccatactcccatgtatttcttcttatctaatttgtctttcgtggacctctgttatactactagcattgtcccacagatgctggtaaatctatggggcccaaagaagtctattacatacggagggtgtgtactccagttcttctttgccctggacctgggagccacagaatgtctcctcttggctgtgatggcctatgaccgctatgctgctgtctgtcaacctcttcactacacagtaataatgcaccctgtgctttgccagaagatggtgctgtcggcctggttgggtggtctcggcagtgcgttaattctttgttccttgactttgaagttgccaaggtgtgggcaccgggaagtggataattttttctgcgaaatgcctgcattgatcaagatggcttgtgtttactccagagtgattgagatcgttgtgtttactcttggagtcatatttcttctagtacctctatctctaatcctcatctcctatgcagttatcactcaagctgtgatgaagatcaagtcagcgacaaggtggagaaaggtcctcaatacatgtggctcccacctcacagttgtaacactgttttacggaacactcatttacatgtatatgaaaccacagaacaccatatctcatgaggaaggacaattttttacccttttttacaccattgtcacccccagccttaaccctttgatctataccttaagaaataaagatgtaaagaatgcagtgaagagaattctaggaatggacaagcattctggcaaagtgtga

SEQ ID NO: 607 - DNA, 951 bp, Mus musculus
  MOR256-16
atgtcagtgaatcgcatcagtgcagatttcccagaagatttcattcttatgggctttaccaagtacccatggctggatctccctctcttctttgtcctcctgacctcctacatgttcacattgctgggaaacattgctattattttggtttctcagctcgattcccagctccaaagtcccatgtatttcttccttaccagcctttcatttttggatctctgttttaccactacgactgtccctcaaatgttgtttaacttacagggacccaacaagaacatcacttacataggctgcatggcccaggcctatgtgtttcattggttaggctgtactgaatgtgttcttcttggtatcatggccttagatcgctatgtggctgtgtgcaagcctctgaggtactctgtcattatggaccacaggctctgtctgcagctgtctggtgctgcttggctcactggcctggctaactcactactacagtctacacttaccatacagttgcccctgtgtgggaatcggatgcttgaccacttcttctgtgagctgcctgggcttattaagatgtcttgtggggacaccacagtcaatgaggttactttagcagtggtggccacattcttcataatgggtcccctctccatgatacttgtatcatatagttacattgctcaaactgtatttcgaatgccttctgcggcagggaggctcaaggctttcaacacttgctcatcgcacctgctggtggtgtctttattttatggaccagggatctacatctacatgcaaccctcagaggatggctcccaagaccttatcaaggtcttgactctgttttactgtgtcatcactcccatggctaatccattcatctatactctgaggaacaaagatgtcataggagctttgaagagacttctgaggaaggccatttcaactaaggggatatga

SEQ ID NO: 608 - DNA, 951 bp, Mus musculus
  MOR174-12
atggcttatgaagtgatgaaccagacttctgcgaccacattcatcttggttggtttctcagaatatccacagctccaaatacccctcttcctcctgttcttgaccatctactcagtaacattgatggggaacctgggcatacttgtggttataaagggtaatcccaaacttcacactccaatgtacttttttcttagccacctatcatttttggatatatgttattctagtgtatttacacccaaacttttgcagatcttgatcatggaagataggacgatttcttttattggatgcatgatacaatttttctttatttgtacattcgtgattacagaaatgttcatgttagcagtgatggcctatgacaggtttgtggctgtttgtaatcccctactctacacagttgtgatgccttttcaattctgtgctctgctagtagctgggacatacatgattggtggactgtgtgctgtaatacttatatatactcttttgcaactctcctattgtgaatatggcatcatcaatcactttggctgtgagtattctgctgtcatctctgtgtcttgctctgattcctcctttagtcagttggcatgcttagtcatttctatatttagtgaatcttctagtgtcctgatcactttagcctcatatgtgttcatagttgtcactattataaagatgccttccaaaggaggactgagaaaagccttctccacctgtacttcccacctgactgccatatcaatcttccatgggatcatactcctcctgtactgtgttcccaactcaaacagctcacggctctttgtcaaagtggccactgctctttacacagtcatgatccccatgttgaacccccttatctatagccttagaaataaagatgtgaaggacacagtcaggagacttatcagctcaaaactgcactctcacttgacataa

SEQ ID NO: 609 - DNA, 939 bp, Mus musculus
  MOR174-13
atgataaaccagagttctgtaaccacatttattctggtgggtttctcagaatatccacacctccagccacccctcttccttatggtaatgaccatttacacagtcactctggtaggaaatgtaggcataattttggtcagaaggatcaaccctaagcttcacacacccatgtacttttttctgagccatctttcatttttggatatatgttattctagtgtagttacaccaaaattgttagagatcttgattgtggaacatagaactatttctttaaatggttgcatgacacagtttttctttggctgtgcatgtgtgattacagagatgttcatgttagcagtgatggcctatgacaggtttgtggctgtttgcaaccccctgctctatactgttgctatgtctcatcaattgtgtgctctcctagtagctggaagttatatgtggggaggtctgtgtgctgtgataatcacatacactcttgtagagctctcttattgtgaacctggcatcattgatcactttggctgtgaatattcagccattgtctctgtatcctgttctgacccctccttcagccagatggtatgcttagtcatttccatattaagtgagggtagtagccttcttatcactatggcctcctatgtcttcatcgttgtcacaatcatcaagatgccttctaaagatggactcagaaaagccttctccacctgtacttcacacctgactgccatcagcatcttccatgggattattctccttctctactgtatacccaatgcaaagagctcaaagctgctggtcaaagtagcaactgtactctatacagtccttatacccatgctgaaccccctcatctacagcctaaggaacaaagatgtaaaagagacagtcaagaggctcatcagctcaaaattgcactctcagacaatataa

SEQ ID NO: 610 - DNA, 912 bp, Mus musculus
  MOR230-5
atgtataaccatacgatgactgaattcattctgtttgggttgacacaggatccagaacaacagaaggcaatatttggagtcttcttgattctttaccttatgactttaatggggaactttctcataatggtgaccattaagatgagtcagacacttgggagtcccatgtactttttcctcttctatttatctttcgctgatgcttgcttctctacaactacagcacctagattgattgcagatgccctattgcagaaaaaaatcattacctataatgaatgtatgactcaggtctttgcagttcacttctttgggtgcatggagatctttgtgcttatcctcatggcctttgaccgctatgtagcaatctgtaagcctctaagatatacagctataatgagccaatatatctgtggtgtattagtgattcttgcctggatagggtcgtgtattcactcttcagcacagattttcttagccttaagactaccattctgtggcccaaatgtgattgatcactatttctgtgatttgcagcccttactgaaacttgcctgcatggatacttatgtgataaatctgctagttgtatctaatagtggtgcaatatgtacggtaagtttcatagtactgcttatctcctatattgtaatcttatactctctgagaagccacagtgcagaaggaagacgaaaggccttgtctacatgcacttctcatatcattgtggtgatcttattttttggtccttgtatatttatatacacacggccaccaaccacttttccaatagacaaaatggtatctttgttttatacaattggaacacctgtgctcaaccctcttatctatactctgaggaatgcagaagtaaaacatgccatgaaaaagttatggggtaataaagtgtga

SEQ ID NO: 611 - DNA, 912 bp, Mus musculus
  MOR230-6
atgcataactatagtgttactgagtttattctttttggattgacacaggatccagaaaaacagaaggcaatatttggagtcttcttgattctttaccttatgactttaatagggaacttcctcatcgtgatgaccattaagatgagtcagacacttgggagtcccatgtactttttcctcttctatttgtctttcgctgatgcttgcttctctacaactacagcacctagattgatcatagacgccctctcgcagaaaaaaattattacttataatgaatgtatgactcaggtctttgcagctcacttctttgggtgcatggagatcttcgtgcttatcctcatggccattgaccgctatgtagcaatttgtaagcctctcagatatacaactataatgagccaacgtatttgtggcatattagtgattcttgcctgggtagggtcttgtattcactcttcagcacagattttcttagccttaagattaccattctgtggcccaaatgtgattgatcattatttctgcgatttgcagcccttattgaaacttgcctgcatggatacctatgtgataaatttgctagttgtgtctaatagtggtgccatatgtatggtaagtttcacactactgcttatctcctatattttcatcttatactctctgagaaatcacagtgtagaaggaagacgaaaggccttgtctacatgcacttctcatttcattgtggtggtcatattttttggcccctgtatatttatatatacacgcccaccaaccaccttcccaatagacaagatggtgtctgtgttttatacaattggaacacctttgctcaaccctcttatctatactctgaggaatgcagaagtaaaaattgccatgaaaaaattgtggtgtggtaaagtatga

SEQ ID NO: 612 - DNA, 954 bp, Mus musculus
  MOR146-2
atggaactatataatttaacaagtaacttggaattccttctccttggactctcagaggaccctgaactacaacctgtcttatttgcactattcctgctcatatacctgctcactgtgcttggaaatgtgctcatcatcttggccatcagctgtgattcccacctccacagcccaatgtacttcttcctctacaacctttcattgtctgacatgggcttcagcagcaccaccatccccaaaatgctgataaacttgcatgcccataacagaaccataacttatgctgaatgcctaacccaggtatctttcttttttctttttgggtgtatggacagcgttctactggcagtgatggcctacgaccgatgggtggccatttgtcaccctctacactaccaagtcattctaaatcctcgtctgtgtagatatttggttgtaatgtcattttgtatcagtctcattgattcacaggtgcactgctttatggtgtcacaattaaaattttgtactaatataaaaatccctcatttcttctgtgatgttccagagcttctaaaacttgcctgttctgacacctctataaatagcatagttatatttcttgtcagtatcattgttggattcctccctgcctcaggaatcttttactcctactataagattatttcctccattgttagagttccttcatctggggggaaatgtaaagcgttctctacttgtggatctcatctgtcagttgtttgcttattttatggaacaggtcttggtgtataccttagctcatctatttctagttcttccaaggaaagtgtggtgacttcagtaatgtataccatggtggttcccatgataaaccccttcatctacagcttgaggaacaaggatatcaaaaaggccctacagaaaattttcagtcaaataataatgttacctacctatataatcccttaa

SEQ ID NO: 613 - DNA, 939 bp, Mus musculus
  MOR151-1
atggaaactgtgaatcaaacaatcatatcagaatttattcttctggggcttagtgatgatccaacactgcaaccttttatctttaccctgttcctgaccatatatctgatcaccaccttaggaaacttgctaatcatcctagctgttagctctgactcccaattacacacacccatgtatttttttctctgtaacctgtcctttaatgacatctgtttaatcaatactacaatcccaaagatgttggtgaacattcagagggaggatcacaccatcacatacacagcatgcctctctcaagtctatctcatcttgaattttgctggtatagaaaactgtctcctggcagtgatggcctatgaccgctatgttgctatttgtcaccctctgaagtatacagttattatgaatcaatatgtatgtgctatgctgctgctcttctctctgttccttagtattgtgcatgctttgttccacactttgatgatattgctgctatccttctgcacagaaattgagataccccacttcttctgtgagctggctcagatcatcagacttgcctgttctgataattttatcaattatctgctagtttacacagtgtctgttctattttttggtgttcctgtctttgggattattttgtcttatattcacattatatcctcagttttaaaaatgtcatcattgggaggaaagtataaagccttttcaacatgtgggtctcatttgtcagttgtgtccctgttctatggtacaggttttggggtacacataagctctgcatttacagactctccaaaaaagactgtagtggcttcagtgatgtacactatcatcactcagatgctgaacccctttatctacagcctaagaaacaaagagatgaagaaagccttcaggaaaatcactagtaagataccatttcttttgtaa

SEQ ID NO: 614 - DNA, 930 bp, Mus musculus
  MOR146-3
atggaaccatataattcaacaggaaccttggaattcattctccttggactctcagaggaccctgaactgcagttcatcttatttgcactattcctgctcatatatctgctcactgtgcttggaaatgttctcatcatcttggccatcagctgtgattcccacctccacagcccaatgtacttcttcctctacaacctttcattggctgacatgggcttcagcagcaccaccatccccaaaatgctgataaacttgcatgcccacaacagatccacaacatatgctgaatgcctaactcaggtatctttctttattctttttgggtgtatggacagctttctactggcagtgatggcatatgaccgatgggtggccatttgtcaccctctacactaccaagtcattctgaatccttgtcggtgtagatatttggttgtaatgtcattttgtatcagtctcattgattcacaggtgcactgctttatggtgtcacaactaacattttgtactaatatagaaatccctcatttcttctgtgatgttccagaacttgtaaaacttgcttgttctaacactactatcaatgacatagccatgtttctttcaagcatcattactggattcctccctgcctcaggaatattttactcctactataaaattacttcttctatttttagagttccatcactgttagggaaatataaagccttctctacctgtggatctcacctgtcagttgtttgcctattttatggaacaggtataggagtctacctcagttcaacagtttctagttcttccaaggaaagtatggtggcttcggtaatgtatacaatggtggttcccatgatgaaccccttcatttacagcctgaggaacagggacatcaagaaagccctctggaaaattgtctgtaagataacataa

SEQ ID NO: 615 - DNA, 939 bp, Mus musculus
  MOR149-2
atggaacctggaaaccaaacaggcacatcctactttattctgatgagactaaactatgatcctacagtagagcccctcatctttggcttctttatgtttacatatctggttacaattgtgggaaatttgctcatcatcattgctgtcagctctgactcccatctacaaacaccaatgtatctctttctctccaagctttcatttactgacatctgcctaagtacaaccactgtcccaaacatgttgaagaacatccacacacaggatcatagcatcagttacacaggttgcctcactcaggcctgctttgttttgagtttcgctgtattagaaagcagtgtccttgctgcaatggcctatgaccgctatgcagctatttgtcatcccctgaattacacagtaattatgaatccccaattctgtggtttgctgattctattgtccttgatcattagcactgcgaacagcttattacagtgtctgatgatactgcggttgtcattttgcacaaataatgaacttcctctgttcttctgtgagcttgctcaagtcatcaagcttgcctgttctgatactctcatcaattatatcctcatatatcttgcaacatttatatttggtggaattccaatctctggaatcattttctcttatactcgaattgtctcttctattttgaaaatctcttccctgagaggaagatacaaagccttttctacgtgtgggtcacattttgtagttgtatccttattctatggtgcagcagtgggagtatacatctgttctgcaattactgtttcccctcagataactacagtgtcttatatgatgtacacagtgctccctcaaatgttgaacccttttatctatagcctaagaaatagagacatgaagaaagctttgggaaaacttatcacaaaggtatcttgctttctgtga

SEQ ID NO: 616 - DNA, 939 bp, Mus musculus
  MOR148-1
atggagccccaaaacaaaacgtttgtgttacagttccttcttcttggatttacagatgatgcagaacttcagtgtctcatcttcagcctcttcctgttcatatacttagtcaccatccttgggaacctgctcataattctgtgtataagctctgagtcccacctccaaacccccatgtacttctttctctctaacttgtcctttaatgacattggtttaagcacagccacagtcatcaagatgctggttaacatccaagcaaatgaccagagcatcacttacacagactgcctcacacagctcttctttgtacttgcttttgcatactttgaaaattttctccttacagtgatggcctatgatcgctatgcagctatttgtcacccattaaggtataatatcattatgaatcctaacttatgtgttctactctcactaaattctctgttcattagtgttatggattccctgattcacacacttatggtgcagcggctgtccttctgcacagatctggaaatccctcacttcttctgtgagcttgatcaggtcatcaagctttcctgttctgacacccgaattgacaacatcgtgctctttgttgcaacttgtgtatttggtggtgttcctctttgtggaatcatttattcttattatcatattatgtctacaatcttgaagataacatcattggagggaaaatataaagccttctctacttgcgggactcacttgtcagtggtttccttattttatggggcaggttctatggtatatattagctctgcaataagtgcctcaccaggaaaatctgcagtggcttcagtgatgtactctgtgcttcctcaaatgatgaacccttttatctacagcttaaggaacaaggatatgaaagttgccataagaaatctttttagcaggaccatttcacttgaataa

SEQ ID NO: 617 - DNA, 948 bp, Mus musculus
  MOR147-2
atgaacaacatggaaaagagaaaccaaacaacttttccaggattccttcttctgggactgacagaggacccaaaactacagcctgtctttgtcagtttgttcttttctatatatctgatcaccatcctgggaaaccttcttataatcttgatttccatctctgatgcccatcttcatacccctatgtacttatttctctccaatttgtccttaaatgacatctgtttaagcacaagcacgatcccaaagatgctggtgaacataaaagaaaatagtcaaagcattacatacaaaggctgcctcactcaaatgagctttgttttaattttttgtggcatggaaaactgtctccttgcagtaatggcttatgaccgttatattgctatttgtcaccccctaaggtacacagtcatcatggaaccctgtttttgtgtcctgctgattctattgtccctgctcattagtgttgttgatactttgatgcacagccttatggtgctccgactgtcattctgcacacacctggaaatatcaaatttcatctgtgaacttccccagatcctcaagttggcctgttctgatactctcattgataacatattgatctatctttctgcatgcatatttactggtattcctatctctggaatagttttttcttatgttcacataatatcttctattttgagaatgtcatcattagaaggaaagcacaaagcctttaccacctgtgggtctcacttgtcagttgtatccttgttttatgggacagcttttggggtatatattacgtctattattatggattcatccaggaatactgcagtggcatcagtgatgtattctgttgtacctcagatgctgaacccctttatctacagtctgaggaacagggacatgaaagaagctatggggaaattcttcagtcggatggcttcttttctatga

SEQ ID NO: 618 - DNA, 948 bp, Mus musculus
  MOR147-3
atgaacaacatggaaaagagaaaccaaacagcttttccaggattccttcttctgggactgacagaagacccaaaattgcagcctgtcttggtcagcttgttcttttctatatatctggttaccattttcgggaacatgcttatagtgttgatttctatctctgactcccatcttcacacccctatgtacttacttctttccaatttgtccttaaatgatatctgtttaagcacaagcacaatcccaaagatgctggtgaacatacaagaaaatattcaaagcatcacatacaaaggctgcctcactcaaatgaactttgtcttaatatttggtggcatggagaactgtctccttgcagtaatggcttatgaccgatatgtggctatttgtcaccccctaaggtacacagtcatcatggaaccctgtttctgtatcctcctgattctgttgtccctgctaattagcattgtggattctttaatgcacagcctgatggtgctaagactgccattctgcacacatctggaaataccaagcttcttctgtgaacttcccaagatgctcaagttggcctgttctgataccctcattgataacattctgatttatatttcatcatgcatatttgctggaattcctctctccggaattgttttttcttatattcatatcatgtcctctattttgagaatgtcatcatcagaaggaaagcacaaagcctttaccacctgtgggtctcacctgtcagttgtgttcttgttctatgggacaggttttggggtatatattacatctatcattatggattcatccaggaagactgcggtggcttcagtgatgtattctgttgtacctcagatgctgaacccctttatctacagtctgaggaacagggacatgaaggacaccatgaggaaattcttcagtagaatagcttctgttctatga

SEQ ID NO: 619 - DNA, 939 bp, Mus musculus
  MOR256-17
atggaggtggacagcaacagctcctctgggagcttcattctgatgggtgtctctgaccatccccatctggagatcatcttttttgctgtcatcctggcctcttacttgttgacgctggttgggaacttgaccatcatcctgctttcgcgccttgatgctcggctccacacacccatgtacttcttcctcagcaacctctcctctctagaccttgcctttactaccagttcagtccctcagatgctgaaaaatttatgggggccagacaagacaatcagctatggtgggtgtgtaactcaactctatgttttcctttggctgggggctactgagtgcatactgctcgtggtgatggcatttgatcggtatgtggcagtttgtcggcccctgcactacatgaccgtcatgaatcctcgcctctgctgggggctggctgctattagctggttgggtggcttaggcaactccgtgattcagtcaacattcactctccagctcccattttgcggacaccgaaaagtggacaacttcctgtgtgaggtacccgccatgattaaattggcctgtggagacacaagtctcaatgaggcggtgctcaatggtgtttgtaccttcttcactgtggtcccagtaagcgtcatcctggtctcttactgcttcattgctcaggcagtgatgaagatccgctctgtggagggacgtcgaaaggctttcaatacgtgtgtctcccacttggtggtagtgtttctcttctatggctctgcgatctatgggtatctgcttccagctaagagcagtaatcaaagccaaggaaaattcatttctctcttctactctgtggtcacacccatggtgaatccgctcatctatactctaagaaacaaagaagtgaagggggccctgggaagattgctggggaaaggaagaggagccagctga

SEQ ID NO: 620 - DNA, 924 bp, Mus musculus
  MOR252-1
atggctccagtgaaccagtcagctataaccatgttcatcctgcaaaacttcgttgatgacccctggatccaggatgttctcttctgcctcctctttgccttgtttatggcagccatagctggcaatggcctgatcatcgccaccattcacagcagtcccaacctccacactcccatgtacttcttcctagtcaaccttgccctgatggatatgatctgcactgtgactgtcttgcccaaagtcctgcagagcctggtggcagagaacagcatatcttatggaggatgcctcatacagatgtttgtcttctcctgggtcctgggctctgagcttctgcttttctctgccatggcctatgaccgctaccttgcaatctgtcggccactgcactatggtaccctcatgagtggcagggtctgtgtggcccttgcaacctttgtgtggttcattggagctctcaattccttggtgctcacttgtctggtgttgccactgtctttctgtggttccaatctcattgcacacttcttctgtgagatcccttctgtattgatactgtcctgcagtcccacctttatcaacaatgtcatgactgtcattgcagacatgttcctgacaggcctgaacttcctgttgactatgacatcctatgtcttcatcatttccagcatcctgcgcatccgctcagctgagggcaagaagcgtgccttctccacctgctctgcccacctggttgtggtcaccctttattactctactgctctatatacttatgtccgaccagccctaggaactgctgggctcctggacaaggtcattgctattccgtacacaactgtgaccccatctctgaacccccttatctatactctgagaaacaaggaattcaaaacatcctttaaaaaacttttatttccccgttga

SEQ ID NO: 621 - DNA, 924 bp, Mus musculus
  MOR252-2
atggcgctggtaaaccagtcggttgtgaccatgttcatcctgcaaaggtttgttgatgacccctggatccaggatgttctcttctgcctcttctttgccttgttcatggcagccatagctggcaatggcctgatcatcgcaaccatccacagcagtcccaacctccacactcccatgtacttcttccttgtcaatctttccctgatggatgtgatctgcactgtgactgtcttgcccaaagtcctgcagagcctggtggcagagaacagcatatcttatgggggatgcctcacacagatgttcgtcttctcctgggtcctgggctctgagcttctgcttttctctgccatggcctatgaccgctaccttgcaatctgtcggccactgcactatggcaccctcatgagcggcaaggtctgtgtggcccttgcaacctttgtgtggttcactggagctctcaattccttggtgctcacttgtctgatgttgccattgtctttctgtggtcccaatctcatcacacacttcttctgtgagatcccttctgtattgatactgtcctgcagtcccacctttatcaatgacatcatgactgttattacagacatgttcctgacaggcctaaacttcctgttgactatgacatcctatgtcttcatcatcgccagcatcctgcgcatccgctcagctgagggcaaaaagcgtgccttctccacctgctctgcccacctggttgtggtcaccctttattattccactgttctctatacttatgtccggccagccctaggaactgctgggttcctggacaaactcattgctgttctgtacaccactgtgaccccatctctgaacccccttatctataccctgagaaataaggaatttaaaatatcctttaaaaaactcttatttccccattga

SEQ ID NO: 622 - DNA, 954 bp, Mus musculus
  MOR104-4
atgtcctcaaaatacttaatggcttggagtactggccagaacctgtccacaccaggaccattcatcttgctgggcttcccggggccaaggagcatgcgcattgggctcttcctgcttttcctggtcatgtatctgcttacagtagctggaaacctggccatcatctccctggtgggtgcccacagatgcctacagacaccaatgtacttcttcctctgcaacctctccttcctggagatctggttcaccacagcctgcgtgcccaagaccctggccacgtttgctccccggggtggagccatctccttggctggctgtgccacacagatgtacttcgtcttttctctgggctgtaccgagtatttcctgctggctgtgatggcttatgaccgctacctggccatctgcctgccactgcgctacggtggcatcatgacacctgggctggcgacacggttggccctgggatcctggctgtgtggcttttctgcaatcatagttcctgctgccctcattgcccgcctctctttctgcggctcacgtgtcatcaaccacttcttctgtgacatttcgccctggatagtgctttcctgcacggacacgcaggtggtagagctagtgtcttttggtattgccttctgtgtcattctgggctcctgtggtatcacactagtctcctatgcctacatcatcactaccatcatcaagattccctctgcccagggccggcaccgcgccttctctacctgctcatcccatctcactgtggtgcttatttggtatggctctactatcttcttgcacgtgaggacctcggtagagagctccttggacctcaccaaagctgtcacagtgctcaataccattgtcacacccgtcttgaaccctttcatatataccctgaggaacaaggatgtgaaggaggctctgcgcaggacaatgaaggggaagtga

SEQ ID NO: 623 - DNA, 942 bp, Mus musculus
  MOR126-1
atgtccaaggggagggagaatgagactggagtcagcgagtttctcctgcttggcatcaccaatgacccacagcagcaacaaatcctcttctgggcttttctgtgcatgtacctggtcacggtagctgggaacacactcatcttcctggccatcatctccgatccccgcctgcacacccccatgtacttcttcctggccaacctttccttcgttgatgtctgcttcaccaccaatctcatccccaggctcctggctggccatgtggctggaacaaggaccatctcttatgtccactgcctaactcagacgtacttcctgatttcttttgccaatgtggacacctttctgctggctgccatggccctggacagatttgtggccatatgctacccactacagtaccacaccatcatcaccccccagctctgtgtggggctggcagccgttgtgtggatgtgctctgccctcatctctctgatgcacacactcctcatgagcagactgagtttctgctcctccatcccggagatctctcacttctactgtgatgcttacctgctcatgaagttggcctgttcagacacacgagtcaatcaacttgtcttcctgggagctgtggtcctctttgtggccccctgcattctcattgtggtctcttatgtccgaatcaccatggtggtcctccagatcccctctgcaaagggccggcacaagacattttccacatgtagctcacacttgtctgtggtcactctgttctatggcacagtactgggtatctatatacgacctccagactccttctccacccaggacacggtagccaccatcatgtatactgtggttacccccatgctgaaccccttcatttacagcctgaggaacaaggacatgaaggagtcagtgacaaggctcctcaacaggggctctaagtcctcttag

SEQ ID NO: 624 - DNA, 942 bp, Mus musculus
  MOR126-2
atgtccaaggggagggagaatgagactggagtcagcgagtttctcctgcttggtatcaccaatgacccacagcagcaacaaatcctcttctgggctttcctgtgcatgtacctggtcacggtagctgggaacacactcatcttcctggccatcatctccgacccctgcctgcacacccccatgtacttcttcctggccaacctttccttcgttgatgtctgcttcaccaccaatctcatccccaggctcctggctggccatgtggctggaacgaggaccatctcttatgcacagtgtctgactcagatgttcttcatgatttcttttgcccatgtggacacccttctgctggctgccatggccctggacagattcgtggccatatgctacccactacagtaccacaccatcatcaccccccagctctgtgtggggctggcagccgttgtgtggatgtgctctgccctcatctctctgatgcacacactcctcatgagcagactgaggttctgctcctccatcccagagatctctcacttctactgtgatgcttacctgctcatgaagttggcctgctcggacacacgagtcaatcaacttgcctctctgggaaccttgtttctctttgtggccccctgcattctcattgtggtctcttatgtccgaatcaccatggcggtcttccagatcccctctgccaagggcaggcacaaggcattttccacgtgtagttcacatttgtctgtggtcatcctgttctatgggacgattctggggatctatatacgacctccgggctccttctccatccaggtctcagtagccaccatcatgtatactgtgtttacccccatgttgaaccccttcatttacagcctgaggaacaaggacatgaaggagacagtgacaaggatcctcaacagagactctaagccctcttag

SEQ ID NO: 625 - DNA, 918 bp, Mus musculus
  MOR156-1
atgaactgcagtcaggctcctacattaatcctcttgggactgtctagtgatgcagagaaatggcagcccctctttagcatcttccttgttatctacttgctgggtctcttagggaacctgctacttttgttagctattggcactgatgtccacctccacacccccatgtatttcttcctcagtcagctctcatttgtggatctttgcttcatcaccaccacagcccctaaaatgctggaggctctgtggactggagatggatcaatctcattctctggatgcctgactcagttgtacttctttgctgtttttgctgacatggataacctgcttctagcagtcatggctattgacaggtatgccgctatctgtcatccactgcgctactcagctctcatgactccttttagatgtggggttctagtcagtgggtcatggggagtaactaattgtgtgtctctgacccatactttgttgctctctaagttatatttccataccaatcaagagattcctcattttttctgtgaatttgggcctctcttattgctttcctgctcagatactcacctcaataaaatcctggtgataattttggttggaattttaggaatcagtgcagttctctgcattgtaagttcttatggttgtattttttatgctgtggctaaggttccatcagcacaggggaaaaggaaagcattgtccacatgcagttcccacctctctgtagtcctccttttctacagcacagtctttgctacctacctgaagcccccatctagttctcgttcctctgaggaggtggtagctgctgtcatgtattctctcgtaactcccactctgaatcccttcatttatagtctgagaaataaggatgttaagagttcattgaggagaatcctaaacatggagtag

SEQ ID NO: 626 - DNA, 942 bp, Mus musculus
  MOR121-1
atgggaatcctttccacaggaaatcaaactgtcactgagtttgtacttcttggtttccatgaagtccctgggctgcacctcctgtttttttctgtgttcaccatcctctatgcctccatcatcacagggaacatgctcattgcagtggtggtggtgagctcccagaggcttcacacacccatgtatttctttctggtgaatctgtccttcatagagattgtctatacctccacagtggtgcccaaaatgctggaaggcttcttacaggaggccaccatatctgtggctggctgcttgctccagttctttgtttttggctctctggccacagatgagtgttttctgctggctgtgatggcatatgatcgatatctcgcaatttgtcaccctctacgatacccacacctcatggggcctcaatggtgcctggggttggtgctcacagtctggctgtctggcttcatggtagatggactagttgttgctctgatggcccagttgagattctgtggccccaacttagttgatcacttttactgtgatttttcacctttgatggtcctggcttgctcagatacccaagtggcccaggtgactacatttgttctctctgtggtcttcctgactgtcccctttgggctggttctgatctcctatgctcagattgtagtgactgtgctgagagttccttctgggaccagaagaaccaaggccttctccacatgctcctctcacctggctgtggtgtccacgttctatggaacactcatggtattgtacattgtgccctctgctgttcattctcagctcctctccaaggtcattgccctgctctacacagtggtcactcccatcttcaaccctgtcatctacaccttgaggaaccaggaggtgcagcaggcactaagaaggcttctctactgcaaaccaactgaaatgtga

SEQ ID NO: 627 - DNA, 939 bp, Mus musculus
  MOR263-6
atgggcaccaactcctctctggttactgagttcgtgctggtgggcttctcacgtctggtccacctgcagggcatcctcttctccctgttcttgaccgtctacctgctcactgtggcaggcaatctcctcatcgtggcgctagtctccacagatgcagcgttgcagtctcccatgtacttcttcctccgcatcctctcagccctggagatctgctacacgtcggtcacagtccccttgctgctgcaccatctgctcactggccggcgccacatctcgcgctctggctgcgctctgcaaatgttctttttccttttctttggtgccaccgagtgctgcctgctggctgccatggcctatgaccgctatgctgcgatctgcgagcccctgcgctaccaggtgctgctcagccgcagggtttgtgtgcagctcgcgggcgccgcgtggtcttgcggggctctagtggggctgggccacacctccttcatcttctccttgcccttctgtggccccaacgctgtccctcacttcttctgtgagatccagccggtgctgcagttggtgtgtggagacacctcgctcaacgagctgcagattatcctggctgccgcccttatcatcttgtgcccctttggcctcattcttagctcctacggacggatcctggtcaccattttccgcatcccatccgctgctggtcgccgcaaagccttctccacctgttcctcccacctggtagtggtgtctctcttctatggtactgccatctttatctatatccgccctaaggccagctatgacccaaccacggaccccctgctgtccctcttctatgctgtgatcacccccatcctcaatcctgtcatctacagcctgaggaatgcagacgtcaaggccgccctaaaaagaagcatccagaaaatggggccctccgagatttga

SEQ ID NO: 628 - DNA, 933 bp, Mus musculus
  MOR156-2
atgatgaactgcagtcaggctcctggcttcatcctgttgggactgtccagtaactcagagaaatggcaacccctctttagcatcttccttgttctctacttgctgggccttttagggaacctgctacttctgttagctattggcactgatgtccacctccacacccccatgtatttcttcctcagtcagctctcactcgtggatctttgcttcatcaccaccacagcccctaaaatgctggagactctgtggactggagatggatccatctcgttctctggatgcctgactcagttgtacttctttgctgtttttgctgacatggataacctgcttctagcagtcatggctattgaccgctatgctgctatctgccacccactgctgtacccacttctaatgactccttgtagatgtagagttctggtcagtgggtcatggggagtagctcattgtgtgtctctgacccatattttgttgctctctcagttatattttcataccaatcaagaaattcctcattttttctgtgactttgggcctctcttattgctttcctgctctgatgctcacctcaatgagagtctaatgatggctttggctggagttttgggaatcagtgcactgctctgcattgtaagttcttatggttgtattttttatgctgtggctaaggttccatcagcacagggaaaaaggaaagccttggctacatgcagttcccacctctctgtagtcctcctattctatagcacagtctttgctacctacctgaaacccccatctagttctcgttcctctggggaggtggtagctgctgttatgtataccttggtcactcccactctaaaccccttcatttatagtctgagaaacaaggatgttaagagttcattgagaaggatcttgaacatggtgaaatctcaggactaa

SEQ ID NO: 629 - DNA, 930 bp, Mus musculus
  MOR156-3
atgaactgtagtaaggctcctggctttatcctgttgggactttccagtgacccagagaaatggcagcccctctttaatattttcctctgtctctacttgctgggccttttagggaacctgctacttctgttagctattggcactgatgtccacctccacacccccatgtatttcttcctcagtcagctctcactagtggatctttgcttcatcaccacaacagcccctaaaatgctggaggctctgtggactggagatggatcaatctcattctctggatgcctgactcagttttacttctttgctgtttttgctgacatggataacctgcttctggcagtcatggctattgaccgctatgctgctatctgccaccccctgttctacccatttctaatgactccttgtagatgcgaagttcttgccagtgggtcatggggaatagctcattgtgtgtctctgttctataccttattactctctcagttttattatcataccaatcaagggatacctcattttttctgtgattctaggcctctcttactgctttcttgctcagacactcacctcagtgagggcctgatgatggctttgtctggagttttgggaatgagctcagttctctgtcttgtaagttcttatggttgtattttttatgctgtggctagggttccatcagcacaggggaaaaggaaatccctggccacatgcagttcccacctctctgtagtcctcctattctatagcacagtctttgctacctacctgaagcccccatctacttctcactcctctgcagaggtggtagctgctgttatgtataccttggttactcccactctgaaccccttcatttatagtcttagaaataaggatgttaagagttcattgagaaagatcctgaacatggacaagtttcagggctaa

SEQ ID NO: 630 - DNA, 930 bp, Mus musculus
  MOR156-4
atgaactgcagtcaggctcctacattcatcctcttgggactgtctagtgatgcagagaaatggcagcccctctttagcatcttccttgttctctacttgctgggccttttagggaacctgctacttctgttagctattggcactgatgtccacctccacacccccatgtatttcttcctcagtcagctctcactcgtggatctttgcttcatcaccaccacagcccctaaaatgctggaggctctgtggactggagatggatcaatctcattctctggatgcctgactcagttgtacttctttgctgtttttgctgacatggataacctgcttctagcagtcatggctattgaccgctatgctgctatctgccacccactgctgtacccacttctaatgactccttgtagatgtagagttctggtcagtgggtcatggggagtagctcattgtgtgtctctgacccatactttgttgttctctaagttatattttcataacaatcaagagattcctcattttttctgtgactttgggcctctcttattgctttcctgctctgatacatacctcaatgagagtctgatgatggctttgagtggacttttagcaatcagtgcatttctctgcattgtaagttcttatggttgtattttttatgctgtggctaaggttccatcagcacaggggaaacggaaagccctggccacatgtagttcccacctctctgtagtcctccttttctacagcacagtctttgctacctacctgaagcccccatctagttctcactcctctcaggaggtggtagctgctgtcatgtatactctggtaacacccactctgaaccccttcatttatagtctgagaaacaaggatgttaagagttcattgagaaggatcttgaacatggtgaaatctcaggactaa

SEQ ID NO: 631 - DNA, 933 bp, Mus musculus
  MOR122-1
atgagtggtgtgagtgagaaccagaccacctggctgaccctcgtgggcttcgggaagctgaaacacctgggcttcctcccctttgccctctttctagccatctatgtggcaacggttggtggcaatatcctcatcgtgcttgctgtggcctccagtcggaccctccacacaccgatgtacttcttcctctgccatttctccctgctggagatcggctacacatccaacatcgtgcctcggctgttacagagcttcctggaaggtggggacctcatctccttggtcggctgcctcgcccagttctacgtgtttgcctctctggctgcagccgagtgtctcatgctctcggccatgtcctatgaccgttacttggccatttgccacccccttcattacccggtcctcatgagcacctggtgctgtgtccgcctagccacgggggcctggttcagtggcttcttcttctctgccttcactctggccttggcagcccctctgtccctctgtcccggccgcagggtgattgatcactacttctgtgacttcgctccggtggtagggctgttctgtggagaggtgtgggtcatgtggggggctggcgtgagcatctcgggctgcctcacactcgcccccttcctgttgatcgtcgcgtcctacgtcttcatcctgcgggctgtgctgagaatcccttccagccacgggaggcagaaagccttctccacctgctcctcccacctcagtgtggtcgcggtattctacggcactctcatcgtggtctatgtggccccgacagagcacatgcccgccttgctccggaaggccttctctgtcttctacacagtgcttacccccatgttcaaccccatcatctacagtctcaagaatcaagaggtcaaatgggctctccgtaggctctgcaggcagctcctctga

SEQ ID NO: 632 - DNA, 936 bp, Mus musculus
  MOR224-3
atgaggaatcgttccgtagtgactcagtttatcctgctcggcatcccaaacacagagggtctggaaactatgctctttgtcctgtttttgtctttctacatcttcactctgatgggaaacttattaatcttactggcaattatctcctccagtcggcttcatacccccatgtacttcttcctatgtaaattgtctatttttgacatatttttcccttctgtgagttctcccaagatgctgttctacctctcaggaaacagcagagccatctcctatgcaggctgtgtgagccagctcttcttctaccatttccttggttgtaccgagtgtttcctgtacacagtgatggcatatgaccgttttgtggccatatgctacccattacgctactcaataattatgagtcacagagtttgtgcgatcctggccacggggacatccttttttggctgcattcaggctacttttctgaccactctcaccttccagttgccctactgtggtcccaatgaggtggactactacttctgtgatatccctgtgatgctaaaactggcttgtgcagacacatcagccctggagatggtggggttcatcagtgtgggcctgatgccgctcagttgtttcctcctcatcctcacctcctacagctgcatcgtctgctctattctgcagatccgatctgctgagggccgtcgtagagccttctccacctgcagtgcccacctcactgccatcttgcttttctacatgccagttgtcctcatatacttaagaccaactccaagcccttggctggatgcaactgtgcaggtcttaaataatctggtcactcctatgctaaacccattaatctacagtctcaggaataaagaggtgaaagcatcactgtggaaggtcttacgtaaacctgcctttgctcctgagcagttgtaa

SEQ ID NO: 633 - DNA, 936 bp, Mus musculus
  MOR171-19
atggcagccggaaaccactgcacagtgactgagttcttcttagttgggctctcagagaagccagaattccagctgcccctcttcctcctcttccttggaatctatctaatcactgtgacaggaaacgtgggcatgatcacactgattgggcttagttcccacctgcacacccccatgtactttttcgtcaggagtctgtccttcattgacttctgtcagtccacagttgttattcctaaaatgctcatgagctttctgacagagaagaacatcatttcctactctggatgcatggttcagctctacttcttcttcatatttggtattgcagagtgctacacgttagctgcaatggcctatgaccgatatgttgctatttgtaaccccttgctttataatgtaaccatgtcctatcagatttacaattctctgatttcggggtcatatatttttgctgtggtctgttcatccttaatcactggcttcatgtttaggattcagttctgtaatttagatgtgattaaccactatttctgtgatcttcttcccctcttgaatcttgcatcctctaatatctatatcaatgaaatattgattctagttattgctacactgaatgtctttatcccagtgatgaccattattacttcctacatcttcattattgccaccattctctacattcactccagtgagggcaagttcaaagggtttagtacttgtagtacccacatctctgctgttgctatcttttatggttcaggagcattcacatacttacagccctcattactgaattctatgggccaagcaaaagtgtcctctgtgttttgtactacagttgtacccatgctgaaccccttcatctacagcctgaggaataaggatgtcagttttgcactgaaaaaaatatttgaaagaaaaaaattcatgtaa

SEQ ID NO: 634 - DNA, 960 bp, Mus musculus
  MOR171-20
atggaggacatgacatcaggaaacaactgcacagtgtctgaattcttcttggctgggctctcagaggagccagaactccagctgccactcttcctgctcttcacaggaatatatctaatcactgtggtagggaacctgggcatgatcacactgattgggatcagttcccacctgcacacagccatgtactttttcctcagcagtctctccttcattgacttctgtcagtccacagttgttacccctaaaatgctggtgagctttctgacggagaagaacatcatctcctaccttggatgcatggctcagctctacttcttcatcatttttggggctgcagagtgctacacattagctgcaatggcatatgaccgctatgttgccatctgtaaccctttactttacactgtagtcatgtcctatcaggtttacagttccttgatttcaggagtgtatatttatgctgtgttctgtgcatcagttcacacaggggtcctgacaaggattcagttttgcaaattagatgtgatcaaccactatttctgtgatattcttcccctcttgaagcttgcatgctctaatacctatatcgatgaaatgttgattttattttttggtacactgaatatctttgctccaacattgatcattattacttcctacatcttcattattgcaagcatcttccacattcgctccagggagggcaggtccaaagccttcagcacctgcagttcacacatctctgctgttgccattttctatggttctgctgcattcatgtacttacaaccatcacgagtgaattcgatggaccaagggaaagtgtcctctgtgttttacactactgttgtacccatgctgaaccccttgatctacagcctaaggaataaggatgttacagttgcactgaagaaaatacttgaaagaaagaatttcatgtggtcagaagtcacataa

SEQ ID NO: 635 - DNA, 933 bp, Mus musculus
  MOR224-4
atggataattacacactactcaatgaattcattcttctcggaataccccagacacaaggactggagactttactctttgtggtgttcttattcatatacttcttcaccttgctcggaaattcactcatctttacagcaatcatttcttcatctacccttcacacacctatgtatttcttcttgggacttctatccgtttttgacatgttgttcccatcagtaacctgtcccaagatgctattttatctttctgtaaggagtccagccatctcttacaaaggatgtgccgcccagctcttcttttatcaccttctgggttctactgaaggatgcctctattctgtgatggcctatgatcgttatgttgcgatatgtcacccactgagatacatgcttatcatgaagcctggagtgtgtgtgagcttggtaataatagcttggttagtgggctgtcttcatgccaccatcttgacctctttaacctttcaattagtctactgtgcatccaaccaagtggactatttcttctgtgatcttcctgcagttttacccctggcttgtactgacagtaagttggcccggaaggtgggttccatcaatgttggctttctggctctgatgcttctcttcagtgtttgtgtctcttatgtacacattggggttgccattctgaggatccgttcagcagagggcaggcagaaagcattctccacctgcagtgcccacctcactgccattctctgtgcctatggacctgtaatcatcatctacctgcagcgcacaccaaaccctctgcttggggctgtggtgcagatattaaataatattgtctcacccatgctcaactctttaatatattcattgaggaacaaggaagtgaagagatccttaaggagagttttccagaatataacatttcatggtcagaaatga

SEQ ID NO: 636 - DNA, 945 bp, Mus musculus
  MOR224-5
atgacaaaccacactatggtgacagaattcaccttgctgggcatccctgagacagagggcctggaaaatgccctgctttttctgttttcaacaatgtatgcctgtgccctgctgggaaactttctcattcttactgcaatcactacctccccaagactacacacacccatgtactttttcttgggaaacctctccatctttgacttaggtttctgttccactacagctccaaagatgttgtcatatctctcaggatggggtggagggatctcttttcagggatgtgttgtacaacacttcttctatcattgtctgggttgcacattgtgtttcttgtacacagtgatggcctatgaccgctttgttgccatatgcttccctttgagatacacaatcatcatgaaccacagagtatgctgtgtcttggccacagggacctggatgagtggctgtgtgcatgccaccatcctaacttccctcactttccagttgccctactgtggccccagtgaggtgagttattacttctgtgacatgcctgcagtgttactgctagcctgtgaagattcctctctagcacagagggtaggtttcacaaatgttggtcttttatctctcatttgtttctttctcattattgtatcctacactcgaattgggatctccatctcaaaaatccgctcaacagaaggcaggcagagagcgttctccacctgcagtgcccacctcacagccatcatgtgtgtctatggacctgtcatcgtcatctacctacagcccaaccctagtccattgcttagtgcgattattcagattttgcacaatcttgtgacacccaccatcaacccattgatctacagcctgaggaacaaggatgtgaaagcagccctgaggcatgtatttcttaagaggtgtcttagcctggaagtaaatgaaaacagctaa

SEQ ID NO: 637 - DNA, 945 bp, Mus musculus
  MOR171-21
atggaagaattaaatcataccccagtggcagagttcattcttgctggtttaacagagaatccagaactccaattgcctctattccttatcttcctatctgtctatttgtttacagttgttggaaacttaggaatgattgtcttgattctgattagttctcagctacatacacctatgtattatttactcagcagtctgtcctttattgactgctgtcagtctactgtcattgttcctaaaatgctgttgaactttgtgacagagaagaatgtcatcctgtacccagaatgcatagctcagttctatttcttctgtacttttgttgttgcaaaatgtcacatgttggctgcaatggcatatgaccgctatgtggctatatctaaccctttgctttacaaagtaaccatgtcctatcaagtctgtttgttgatggtagctgtggtgtatggtattggcttaatcagtgccacagctcacacagtcttcctgctaagattgtttttctgtaaggctgataaaataaaccactacttttgtgatcttttcccattacttgagctgtcttgctctagtacttttatcaatgaaatattagcactgtccttcagtgcatttaatattattgtaccagccatgaccatcattggctcttacatcttcatcattatcagcattttgcacattaaatcctctgggggcagagtcaaggcctttagcacctacagctcccatatcttggctgttgctattttctttggttctacaacattcatgtatctacaaccatcttcagtcagctccatggaccaatggaaagtgtcatctgtgttttataccattgttgtgcctgtgttgaatctcatgatctacagcctgagaaataaagatgtcaaagttgccctaaaaatgttactacagaagatgtttcctcaaaacaaggaatag

SEQ ID NO: 638 - DNA, 933 bp, Mus musculus
  MOR275-2
atgagcaactatactggacaattttcagatttcaccctggtgggattcttcagtcaatccaaacaccctgccctgcttgctgtggtcatatttgtggttttcctgatggccttgtctgggaacactctcctgatcctgctgatactttctgacacccacctccacacacccatgtacttttttatcagccagctgtccctcatggacatgatgtacatttctgtcactgtgcccaagatgctcatggaccaggtcctggggaaccacaagatctcagctgctgcctgtgggatgcagatgttcctgtacctgtcaataggagggtcagaatttttgcttctggctgctatgtcttatgaccgctatgtagccatctgtcatccactccggtatcctgtcctcatgaaccacaggatttgtctcctccttttatctgtctgttggctcctgggatctttggatggctttatgctcacccctgtcactatgaccttcccaatctgtggatcccgggagatccatcacttcttctgtgaggtccctgctgtgacaaagctctcctgctcagacacctggctctatgagaccctcatgtatgtgtgctgtgtgctcatgattcttattcctgtgacagtcatttcaggctcctattcatccatccttctcactgttctcaggatgaactcagcagagggcaggaagaaggcccttgccacctgctcctcccacatgactgtggtcaccctcttctatggcgctgctgtctatacctacatgctccctgcctccctccacacccctgagaaggacatggtggtgtctgtgttttacaccatagtcacccctctgttgaacccactaatctatagttttaggaataagaatgtcacagaggctatgaagaaactgttgggtgtgagcatcccacattag

SEQ ID NO: 639 - DNA, 921 bp, Mus musculus
  MOR285-1
atggagtcaggaaaccacagctgtgggacagaattcaccttagtaggtcttttccagtatggacacatggacaccttcctcttcacactgattgccatcctctttgcagtggctctcatgggcaacatcacactggtcctcctcatcaggctggaccgaagactccacacccccatgtacttcttcctcagccagctctccatcatcgacatgatgtacatctctaccactgtgcccaagatggcagctaacttcctctcagacaccaaggccatttcctttctgggctgtgcagtccaaacctttgtgtttctgaccctgggtggatctgaagccctcctgctgggcttcatgtcctatgacaggtatatagccatctgccaacccttgcactaccctgtgctcatgagtaggaagatctgctgctccatggtcgctggtgcctggagcagcagctccatcaatgcattcatgcacacagtgtatgtgtttcaacttccattctgtggctctaggatggttaaccactttttctgtgaggttccatctctcctgccactggtgtgtgaagacacatcccagtatgagcatacagtcctcgtgagtggacttgtcattctgctgctccccttcctggccatcctagcttcctatgctcgggtcttggttgttgtactccagatgggttcagggaagggacagagtagagctgtgtccacctgctcctcacacctgactgtggccagcctgttctatgtcaccactctctccacctacacccagccacactccttgcattctcctggaagggacaaagtggtggctgtgctctactcaatcgtcacccctgttctgaacccattcatctacagcctgaggaacaaggaggtcatgggggcactgaggagacaaagggggtga

SEQ ID NO: 640 - DNA, 921 bp, Mus musculus
  MOR285-2
atggagacaggaaaccacagctgcgggacagacttcaccttggttggtcttttccagtatggacacatggacaccttcctcttcacagtcatctccatcctctttgcagtggctctcataggcaacatcacactggtcctcctcatcaggctggaccgaagactccacacccccatgtacttcttcctcagccagctctccatcatcgacatgatgtgcatatctaccactgtgcccaagatgggagctaacttcctctcagacaccaaggccatttccgttttaggatgtgagatccaagtctttatgtttatgagtcttgctgggtgtgaagctctcctgctgggcttcatgtcctatgacaggtatatagccatctgccaacccttgcactatcctgtgctcatgagcaggaagatctgctgctccatggtcgccagtgcctggagcagcagctccatcaatgctttagcgcatacagtgtatgtgtttcaacttcctttctgtggctctaggatggttaaccactttttctgtgaggttccatctctcctgccactggtgtgtgaagacacatcccaatatgagcatatgattgtcatgagtgtccttgtccttgtgttgctcccctttctggccatcctagcttcctatgctcgggtcttggttgttgtattccagatgggttcagggaagggacagagtagagctgtgtccacctgctcctcccacctgactgtggccagtctgttctatgtcaccggtctctgcacctacacccagccacactccttgcattctcctggaagggacaaagtggtggctgtgctctactcaatcgtcacccctgttctgaacccattcatctatagtctgaggaacaaggaggtcattggggcgctgaggagacaaatggggtga

SEQ ID NO: 641 - DNA, 966 bp, Mus musculus
  MOR204-16
atggctttcctgcacaatgggaaccacactgcagtgacagagttcattttattgggactaacagatgacccagtccttagaattgtcctcttcaccatcatcctgtgcatctacctggttactgtgtctgggaacctcagcaccatccttctcatcagagtctcttcccagctccatcaccccatgtacttttttctcagccacttggcttctgctgacataggctactcatcttctgtcacacccaatatgcttgtcaacttccttgtaaagcaaaataccatctcctacattggatgttctatacaatttggctcagctgctttctttggaggacttgaatgcttccttctggctgtcatggcttatgatcgctttgtagcgatctgcaacccactgctctattcaactaaaatgtccacacaagtctgtgtccagttggttgtaggatcttatataggaggttttcttaatgcctcctttgccacagtttcttttttattcttgttcttctgtggaccaaacataatcaatcactttttctgtgattttgctcctttgattgagctctcctgttctgatgtcaggatctctgtacttgttacctcattttctgctggcacagttactatgctaacagtgttggtcatagccatttcttacacctatatcctcatcaccatcctgaagatgcgctccactgagggtcgacacaaagccttctccacctgcacttcccatctcactgcagtgtctctgttctatggaaccattacattcatttacgtgatgcccaagtcaagatactccacagaccaaaataaggtggtgtctgtgttctatatggtggtaatccccatgttgaaccccctcatctacagcctcaggaataatgagattaagggggctctgaggagacatcttggtaagaaaatattttctcagagcaatatattgttttattaa

SEQ ID NO: 642 - DNA, 945 bp, Mus musculus
  MOR204-17
atggctttcctggagaatgggaaccacactgcagtgtcagaattcattttgttgggtttgacagatgacccagtccttagaattgtcctattcaccatcatcctgtgcatctacctggtgactgtgtctgggaacctcagcaccatccttctcatcagagtttcttcccagctccatcaccccatgtactttttcctcagccacttggcttctgctgacataggactttcatcgtctgttactcccaatatgcttgtcaacttcttggtggagagaagcacaatttcataccttggatgtggcatccagctcagctcagctgctctctttggtgcaactgaatgcttccttttggctgccatggcttatgatcgcttcatggcaatctgcaacccattgctttattccaccaaaatgtccacaaaagtctgtgtccagttgattgtaggatcctacattgctgggtttcttaatgcttcctcctttttactttccttcttttctcttctcttctgtggacaaaatataatcaatgactttttctgtgattttgctcctttagctgagctctcgtgttctgatgtcagtgtctttgtagttgttatttcattttctgctggcacagttactatgctaacagtgtttgtcatagccatttcctattcctatatcctcatcaccatcctcaagatgcgttccactgaaggtcgccagaaagccttctccacctgcacttcccatctcactgcagtcactttattttacggaacagttacattcatctatgtgatgcctaagtccagctattcaatggaccagaacaaaataatctctgtgttctacatggttgtggttcccatgttgaacccacttatctacagccttaggaataatgagattaagggtgccctgaaaagacattttgataggaaaacattctcttag

SEQ ID NO: 643 - DNA, 945 bp, Mus musculus
  MOR204-18
atggctttcctggaggatgggaaccacactgcagtgacagagttcattttattgggattaacagatgacccagtcctcagagtcatcctcttcaccatcatcctgtgcatctacctggtgactgtgtctgggaacctcagcacaatccttctcatcagagtatcgtcccagctccatcaccctatgtacttttttcttagccacgtgggctctgttgacattggctactcatcttctgtcacacccaatatgcttgtcaactttctggtggagaaacacaccattgcctaccttggatgtggcatccagctcagctcagctgctttctttgggacagctgagtgcttccttctggccaccatggcttatgatcgctttgtagcaatctgtaacccactgctttattccacaaaaatgtccacacaaacctgtatccagttggttgtaggatcttatacaggggggattcttaatgcttcttttgccataatttcttttttttcttttctcttctgtgggccaaatagaatcaatcacttttactgtgattttgctcctttagtggaactctcttgttctgatatcaatgtttctgtagtcattaccacaattttttctgcctcagttactattattacagtgtttgtcatagccatctcctatacctacatcctcatcaccatcctgaagatgcgctccactgagggtcgacacaaggccttctccacctgtacctcctacctcactgcagtcactctgttctatggaactgtcacattcatttatgtggttcccaagtccaactactccactgaccagaacaaggtggcatctgtgttttacatagttgtgatcccgatgttgaaccccctcatctacagcctcagaaataatgatattaagggtgctctcaagagacagcttggtaagaaaaccttttcttag

SEQ ID NO: 644 - DNA, 945 bp, Mus musculus
  MOR204-19
atggctttcatatacaacggtagccagacaacagtgacagagttcatattattgggactaacagatgacccagtccttaaagtcatactcttctgcatcatcctgtgcatctacctggtgactgtgtttggaaatctcagcaccatccttctcattggagtctcttctaagctccatcaccccatgtacttttttctcagccacttggcttctgttgatatgggcctttcatcttctgtcacacccaatatgcttgtcaacttcctgactgagaaaaacaccatctcctaccttggatgtggcatacagctcagctcagctgctttctttggggctgttgagttcttccttctggctgccatggcttatgatcgcttggtagcaatctgcaacccactgctttattccaccaaaatgtcctcacaagtgtgtatccagttggttgcaggatcttatgtagggggtttccttaacgcttcatttgtaacccatttctttttttcttttctcttctgtggcccaaatagggtcaatcactttttctgtgatttatctcctatgatggaactatcctgttctgatgtgagtatctcagaaattgttatctcattttctgcaggctcatttacaatgaccacattgtttgttatagtcataccttacttctatatcttcatcaccatcttgaagattcgttccactgagggtcgccaaaaagccttttccacctgcacttcccatcttactgcagtcactctctactatggaactatcatattcatttatgtgatgccaaagtccacctactccagagaccagaacaaggtggtgtctctgttctacatgctggtaatccccgtgttgaatcccctcatctacagccttcggaacaatgagattaaggatgccctgaaaagacaattttataggaaaacattgttatag

SEQ ID NO: 645 - DNA, 933 bp, Mus musculus
  MOR204-20
atgaatggtggaaaccataccagcatgacagagttattcattttgggaccaacagaggaccctacattctgtatagccttttttgtgatatttctaggagtatacatggtcactttagtaggcaatatcagcatcatcacattgataagaatttcctcccagctgcacacaccagtgtatctattcctcaaccacctggcttttgtagacattttatattcaaccttggtctcggttataatgcttatggagctccttgaacatgagctagccttacctgtagctgcctgtgcagctgagctctgtatcacagtattatttgggtcatctgagtgcttcctactggctgccatggcctatgattgctatgtagcaatctgttcacctctcctgtattcgacactcatgtcctctagagtctgttttctattgttgggaatgtcctatgttggtggctgcatgaatggttggatatttactggctgtttgttaaatctgtccttttatggaccatatcagatagatcactttttctgtgacttctcccctttgctgaaactttcctgctcagatgtttccattattggaatcatcccgtctatctcttctggctccattattgtggtgacagttcttgtcatagctgtcttctacatctgcatacttatgaccatccttaagatgcactccactgatggatgccacaaggccttctccacctgcaactcctacctcactgcagtcactctctactatgggaccattacttttatttatgtgatgcccaagtcgaactactctactgaaaagaacaaggtgctttctgaattctacacagtggtgattcctatgctcaaccaccttatctatagtctgaagaacagagatgtaaaagatgctctgaggaaggcaattgtcagagtatatacatag

SEQ ID NO: 646 - DNA, 927 bp, Mus musculus
  MOR241-3
atggagatcaagaacagctcagtagtaacagaattcatcctacttggcctgacccagtctcaagaagctcaactcctggtcttcgcactgatttcagttttctacctaataattctccctggaaattttcttatcattttcaccattagatcagactctggactcacagccccactttacttctttctgggaaacttggcattcctggatgcctcctactctttcattgtagctcctagaatgcttgtggatttcttctgtgagaaaaaagtcatttcttataaagcctgcatcactcagctattctttctgcactttcttggagcaggagaaatgtttcttcttgttgtgatggccgttgatcgttatatcgctatatgccgtcctttatactactccactctcatgaaccctagagtctgttatgccttattgttggctctgtggcttgggggttttgctcattccattgtacaagtggctcttatcctaaacttgcccttttgtgggccaaaccagctggataactttttctgtgatgttccacaggttgtaaagctagcctgcactgatacctttgctgtggagctcctgatggtttctaacagtggtctacttaccctcttatgcttcttgggacttctggcctcctatgctgtcattctctaccacgtaaaaggacattcttctgaagggaagagcaaagccatctctacatgcaccacccatattataattgtgtttctcatgtttgggcctgccatttttatctatacccgccccttccaggctctccaagctgacaaagttgtttcccttttccacacggtcatctttcctttgatgaatcctgtgatctatacacttcgcaaccaggaagtgaaaacttctatgaggaagttgttaagtcagtatgtgatttgctga

SEQ ID NO: 647 - DNA, 957 bp, Mus musculus
  MOR247-1
atgatgaatgtggctaataagtctgttgtgactgaatttgttttgctgggactctctaattcctgggaactacagatatttttcttcatagtattttcactcttttatgtggcaacaatggtgagtaatagcatgatagtcctcattgtcatatctgactctcacctacactctgctatgtattttctgcttaccaatctttctattattgatatgtctcttgcttcctttgctactcccaagatgatcatagattatctaactgatcataaaacaatctcttttgatggatgcattgctcagatattctttctccacctgttcactggtactgagattattttactaatggccatgtcttttgacaggtatattgcaatttgtaaacctctgcgctatgcctcaatcataagtccccaggtgtgtattgcctttgtggtgtcctcatggattgtaggaaccatgcattcaatgagtcaggtcatatttgccctcacattaccattctgtggtcccaataagatagatagctttttctgtgaccttcctgtggtgttccagctgtcttgtgtagatacttatgttcttggtctctttatgatttcaacaagtggcattattgcattgtcttgcttcattctgttatttaattcatacattattgtgctggttactatcaagcaccattcttccaaaggatcatctaaggctctttcaacctgtacagcccacttcatcgttgtcttcatgttctttgggccatgtatctttatctatatgtggccacaaaacagctttgtgatagaaaagatactgtctgtattttatactatatttactcccattatgaacccagtgatatatactttgagaaatcatgaagtaaattcagccatgaggaaactgagaagtaagttcctaaattttagtacagaaactccttcctattctttatag

SEQ ID NO: 648 - DNA, 930 bp, Mus musculus
  MOR247-2
atggattatgaaaatggatcagctgtgacagaatttattttagtgggattttccagagactggcaacttcaaattttcttctttgtgacatttactttgatctatggtgctactgtggtgggcaacatccttattatagtcacagtggcagctaattctgcccttcattctcccatgtattttcttcttggaaacctctccttcttagacatgtgtctttccactgtcacgacacccaagatgatcacagacttgcttgcagcacacaagagcatctcttttcagggctgcatggtccagatgttcttcagccatttctttgggggtgctgaaatgacccttttgatagtcatggccttcgacaggtatgtggccatatgcaaacctttgcactacaggataatcatgagtcacaggttgctgaacaggtttattatcctttcctggacaattggtttcatacacaccatgagccagatggcattgacagtgaatttgcctttctgtggacacaatattataaataatatattttgcgaccttcccctggtaatcaagcttgcttgtattgaaacatacactctagagttgtttgtgattgctgacagtgggctgctctcctttatctctttcttcctcttgcttgtttcctatactgtcattctgctcattgtaaagcacaaatcacctggcagtctctccaaggcgctgtccacattgtctgctcacataattgtggtcactctgttctttggaccctgtatttttatctatgcctggccatttgggagttttgcaagcaatacaactcttgctgtattttacactgttatcacacctttactgaatcctattatttacacactgagaaatcaggaaatgaagaaagccatgagaaaattatggaaccaacaagtgagctgcagatag

SEQ ID NO: 649 - DNA, 969 bp, Mus musculus
  MOR208-2
atggccacatcagtccacaggaatggaagtctcactccagtgtccttgcaggggttcgtgctggtgggatttgggggaagtgcagagacccaggccctgctctttgctgtcttccttgtcctgtacgtggtgaccatcctgggcaacctcaccatgatcatggtcatcaccctggatgcccgcctgcactcccccatgtacttcttcctcaagaacctgtcctttgttgacctctgcctctcttctgtcattatccctaatgccctggccaacatcttctcttcttctaagaccatcagctttgcaggatgtgccactcagttcttctttttctccttgttggctgccaccgaggctgtgctcttagctgtgatggcctatgaccgcttcatggccatctgcagtcccctgaggtaccctgtgaccatgtgccctatgacctgtgcccgtcttgtcctgggtaccttctgtgtggcgtgcctaaactccattgtgcaaaccagcctcacgttccagctgcccttctgcagctccaactacattgactacttcttttgtgacgtgcccccattgcttcagctggcctgtgccagcacagctatcaatgagcttgtcatgtttggcatttgtggcttcatcattgtgtgtgctgtgtttgtggtcatcatctcttatggttacatcactgtcaccatcctcagaatgcgttcagggtcagggcgacacaaggtcttctccacctgtggctctcacatgacagctgtgtccttgttttatggaactggctttgttatatatggccagccaggaggtgtggcatccatggagcaaggcaaggtggtctccacaatctacaccctggtcatccccatgctcaaccccctcatctacagtctgcggaacaaggatgtgaaggacgccctgaggaggctgggacagaggcacagtctggtgaaggagagtggctag

SEQ ID NO: 650 - DNA, 972 bp, Mus musculus
  MOR208-3
atggccatagcagtctacaggaatggaagcctctcagcagtgtccttgcaggggttcgtgctggtgggatttggggggggtgcagagacccaggccctgctctttgctgtgttccttgtcctgtacgtggtcaccatcctgggaaacctcaccatgatcgtggtcatcaccctggatgcccgcctgcactcccccatgtacttcttcctcaagaacctgtcctttgtcgacctctgttactcctctgccattgcccctaatgccctggccaacttcctctccacctccaaagtcatcagctttgaggcttgtgccactcagctcttcttcttctccttgttggctaccactgaggctttcctcttagctgtgatggcctatgaccgtttcatggccatctgcagtcctctgaggtaccctgtgaccatgtgccctacaacctgtacccgtctggtgctgggcacctactgtggtggctgcctgaactccattgtgcagaccagcctcacgttccagctgcccttctgcagctccaaccgtattgaccacttctactgtgacgttcccccactgctccagctggcctgcgccagcacggctctcaatgagctctttctcttcggcctctgtgggttcatcattgtgagcaccaccttagctgtcctggtttcctatggctacatcactgtgaccattctcaggatgcactcgggatctgggaggcacaaggtcttctccacctgtggctctcatatgatggctgtgtccttgttttatggaactgtgtttgtcatgtatgcccagcctggagcagtggcatccatggcacagggcaaggtgatatctgtcttctacaccctggtcatccccatgctcaaccccctcatctacagtctgaggaacaaggatgtgaaggacgccctgaggaggctgggacagagacacagccttgtgaagaaaggaggcaagtag

SEQ ID NO: 651 - DNA, 951 bp, Mus musculus
  MOR122-2
atgatgaccttatcctgggaaaatcaaacggtgatagtggagtttgttcttcgaggattctcttccatcttacagctgaatatttccctctttataatgttttgcatcttctacatcctaaccatttctggaaacatccttattgtttttctagtgctgtgcaaccatgctcttcacactcccatgtacttcttcctagtgaacctgtcctttctggaggtctgctacacctctaacattgtccccaagatgttgctgattattatagctgaccagaagactatctcagtggttggttgcttggcacaattctacttctttggatcccttgctgcaacagagtgcctcttgcttgctgtgatgtcctatgaccgctacctagctatctgccagcctctccgataccccatcctcatgactggttctctctgctttaggttggctattgggtcttggttctgctgcttcttcctcacagccatcaccatggtcctgctgtgtagacaaaacttctgtggccctaatgaaattgatcacttcttttgtgactttgcccctttgatccatctctcctgcatggatacttcactgattgagaccgttgcctttgccacctcttctgcagtcactctggtcccatttttccttatcacaatatcctactcttgcatcctcattgccatcctaagaatcccatctggcacaggcaggaaaaaggctttctccacctgttcttcccatctcactgttgtcacagtattttatggaacactgattgccacctatcttgtgccctcagccaactcttcccaatatttacgcaaaggtttctctctgctttatactatcctgacacctatgtttaaccccattatctatagcctgagaaacagagacattcatgaagctttgaagaaatgcttgagtaagaagtcagactttctcatatga

SEQ ID NO: 652 - DNA, 939 bp, Mus musculus
  MOR256-18
atggtggaaaatttcaatgcaagttgggaagggtactttatttttctgggtttttctaaatggcctcatctggaagttgttctctttgtggtgatattgatattctacatgatgacactgatgggcaatctcttcatcataattttgtcacacctagattcccacctgcatacccctatgtacttcttcctctcaaatctctctgctttggatctctgttataccactagctctgtcccccagctgctatttaacctctggggcccaaagaaaacaatatcttatgctggttgcatgcttcagctctattttgtccttgctctgggtaccacagagtgtgttctgttggtggtgatgtcctatgaccgctatgtagctgtgtgtaaacccttgcattactctgtacttatgaatcctcgtttttgccaactgctggctgcagcatcctgggtatgtggctttaccacttcagcccttcactcttcctttaccttctgggtacccctgtgtggccatcgcaaagtagaccacttcttctgtgaagtgcctgcactgttgcagttgtcctgtgttgatatccatgcaaatgagatgactctcatggtcatgagtgctatttttgttgtcataccacttattctcatcctgagctcctatgctgccattgcatggactgtcctggaaatgcaatcaaccactcgacttcagaaagttttcgggacctgtggagcccatcttactgttgtttctctctttttcattccaatcatgtgcatttatcttcagccttcaacaaaaagttctcaagatcatgccaagttcattgctctcttctacaccgttgtcacacctagcctcaaccctctcatttatactctaagaaacaaagatgtgagaggggcaataaggaggctgagtaggtatgagagggagaaatga

SEQ ID NO: 653 - DNA, 954 bp, Mus musculus
  MOR256-19
atgacaattaacaagagctcaggtggtgatttcatcctggtgggcttctctgatcagccacaacttgagaagatcctctttgtgctggtgctaatctcctacctcctgacactggtaggcaacacagcgatcatcctcgtttcctgtttggattctgcgctccaaacgcccatgtactatttccttaccaacctctctttcgttgatatctgcttctccaccagcattgttcctcagctgctgtggaacctccatggtccagccaagacaattactgccacaggctgtgctattcagctttatgtgtctctggctctggggtccactgaatgtgtcctcctcgcagttatggcatttgatcgctatgctgctgtttgccgaccacttcactatgctacagttatgcacccacggctctgccaatctcttgcaggagtggcgtggctgagtggagtgggcaacactctgattcagggtaccatcacccttcgcctgcctcgctgtgggaaccacaaaatttatcacttcatctgtgaagttcctgccatgatcaagttagcgtgtgtagacattcatgccaatgaagtgcagctattcatggcttccttggtgctgctcctccttcccctgacactcatcttggtatcttatgggtacattgcccaagcactgatgaggttacggtcagctctaacctggggtaaagctcttggaacctgtgggtcgcacatgctggtagtagtactattttatggcacaatcactgctatctatatccagcctaacagctcctatgcacacagtcagggaaagtttatcacccttttgtatactgtggttattcctactctaaaccccctcatttacactttaagaaacaaagatgtaaagggagctttgaagaggctggtaagaaaaaataacagcactgggaagaaaattctttcgaggtag

SEQ ID NO: 654 - DNA, 921 bp, Mus musculus
  MOR182-5
atggaggtgaacaggaccctggtgactgcgtttattctcagaggaataacagatcttccagagctgcaagttcccatgttcttggtgttcttcttcatctatgtcactaccatggtgggcaaccttggcttgatcgttctcatctggaaggaccctcgtcttcacacacccatgtactttttccttggaagtttagcttttgctgatgcctgtacttcatcctcagtgactcccaggatgcttgttaatatcttagacaatggtaagatgatttccctctctgaatgcatggcccaatattatgtttttggatccagtgcaactacagaatgtttcctcctggtagcgatggcctatgaccgctatgtagccatatgcaatcctttgctctatcttgtggtgatgtccaacagagtgtgcacttgcctgataagtggctcatatataatcggttttctgcatccacttattcatgtaggtctactatttagattaaccttctgcaaatccaatataatagatcatttttactgtgagatcctgccactctatacaatttcttgcaccgacccatctattaatgcatttgtggtcttcatttttgctgctgtgatacaagctgttaccttcatgagtattgcagtctcctatgcccacgtcctcttttccatcctgaaaacaaagtctgagaagggcagaagaaaagccttctccacctgcagtgcccacctactctctgtctctctgttctatggaactctcttctttatgtacgtgagccctgggtctggaccaagtaaatataagaataagatgtattctctgttttacaccattgtgattcctctactaaaccccttcatttacagcttaagaaacaaggaagttttaggggctctgagaaaaatcatgaagccataa

SEQ ID NO: 655 - DNA, 930 bp, Mus musculus
  MOR183-2
atggaaaagaagaatgaaaccctatggactgagtttgttctcacaggtctcacatgcctaccacagtggaaacctctcctattcctagtgttcttggtaatatacttcatgaccattgtcgggaaccttggtctgatcactctcatctggaatgaccctcaccttcacatccccatgtacttatttcttagtaacttagcctttgtggatacatggttatcatccacagtgacaccgaggatgctatttaatctcttggacaagggcaaggtgatttctgtggctgaatgcaagacacaatttttttcctttgcaatcagtgtgaccacagaatgttttctcttggcagcaatggcttacgatcgctatgcagccatatgcaatcctttgctttatccagtgattatgaccaatagattatgcgttcgcctattagccttatcatttataggtggctttcttcatgctgtgattcatgaaagctttttatccagattaaccttctgtaattccaacataatatatcatttttactgtgatgtgataccattgttaaaaatttcctgtactgatccttctttaaattatttgatcattttcattttctctggttcaatacaagtgtttaccattatgactgttcttatttcttacacatttgttctctttacaattttaaaaaagaagtctgacaagggcataaggaaagccttctccacctgtggagcccacctcttgtctgtatctttatactatgggcctcttctcttcatgtatgtgcaccctgcatcttcagaagtagacgatcaagacatgattctctctctgttctacacagttataatccccgtattaaatccaattatctacagtctcagaaataagcaagtcatagattctctgaaaaaaatgttgaaaatgatggtttag

SEQ ID NO: 656 - DNA, 930 bp, Mus musculus
  MOR183-3
atgggaacagagaacacaacactgctgacagaatttgttctcacgggactcagtcaccagccacaatggaaaatccccctgttcctgctgttcttggtcatctatcttatcaccattgtggggaaccttggtctgatcattctcatctggaatgaccctcgccttcaaatacccatgtacctatttcttgggtgtttagctcttgttgatactttgttatcatccacagtgacaccaaagatgctcctcaccttcacagctaagagcaaactgatctctctttctgaatgcatgatacagttcttttcatttgtgatgtgtgcaactatggaatgttttctcttggcagcaatggcctacgatcgctatgcagccatatgcaaacccttactgtacccagtgatcatgacaaatagactgtgtgttcgtctgttagtcttgacctttgtaactggaattcttcatgcttcaattcatgaaggcatgctgtgccgattaaccttctgtaattccaatgtaatacatcacttttactgtgatgttatgccactgttaaagatttcctgtaccgacccttctcttaattacctgattgtttttattttctctggctcaattcaagttttcactatctcaactattctaggctcttacacacttgttctctttacaatcttaaaaaagaaatctgccaaaggcataaagaaagccttctccacctgtggagctcatctcctttctgtgtgcttatattatggttctcttctcttcatgtatctgcttcctgcatcccaaaaagcacaggatgaagacatgatggactctgtattctacactgtcataatccctgtgatgaatccaatcatctatagtttgagaaacaagcaaatcaaagactcactggaaaaattcttaaagagaaatgtttag

SEQ ID NO: 657 - DNA, 942 bp, Mus musculus
  MOR118-1
atggcgaacagcactactgttactgagtttattctgctggggctgtcagatgcctgtgagctgcaggtgctcatattcctgggctttctcctgacctacttcctcattctgctgggaaacttcctcatcatcttcatcacccttgcggacaggcgcctttacacccccatgtattacttcctccgcaactttgccatgctggagatctggttcacctctgtcatcttccccaagatgctaaccaacatcatcacaggacataagaccatctccctactaggttgtttcctccaagcattcctctatttcttccttggcaccactgagttctttctactggcagtgatgtcctttgacaggtatgtggccatttgtaaccctttgcgttatgccaccattatgagcaaaagagtctgtgtccagcttgtgttttgctcatggatgtctggattgcttctcatcatagttcctagttcaattgtatttcagcagccattctgtggcccaaacatcattaatcatttcttctgtgacaactttccacttatggaactcatatgtgcagatactagcctggtagagttcctgggttttgttattgccaatttcagcctcctgggcactctggctgtgactgccacctgctatggccacattctctataccattctacacattccttcagccaaggagaggaagaaagccttctcaacttgctcctctcatattattgtggtgtctctcttctacggcagctgtatcttcatgtatgtccggtctggcaagaatggacagggggaggatcataacaaggtggtggcattgctcaacactgtagtgacacccacactcaaccccttcatctacactctgaggaacaagcaggtgaagcaggtatttagggaacacgtaagcaagttccaaaagttcagccagacgtga

SEQ ID NO: 658 - DNA, 930 bp, Mus musculus
  MOR162-2
atggctgtaggaaattcctcttcagtgaaagaatttattctgctgggcttgacacaagagccagagctccagctgccgctcttctttctcttcttgggaatctatgtggtctctgtgatggggaacctgggcttgattgttctgattgtgttgaatcctcccctgcacacccccatgtactactttctcttcaacctttccttcacagatctctgctactccactgtcataacccccagaatgctggtgggttttgtgaagcagaacaccatctctcatgcagagtgtatgactcagctttttttcttctgcttctttgttattgatgaatgctacattttgacagcaatggcctatgacagatatgctgccatctgtaagcccctgctttaccaggtcaccatgtcccatcaggtctgcctcttgatgacagtggggatgtatgtgatggggcttgtgggtgccatagcccacattgtttgcatgctgagactcaccttctgtgaaggccacataattaatcactacatgtgtgacataccccctctcctgaagctctcctgcacaagtacctacatcaatgagctggtagttttcattgttgtgggtgtcaatgtgatagttcctacattgactatttttattacttataccttaatcctttccaacatcctcagcatccattctgcagaaggtagatcaaaagccttcagtacctgtggctcccatgtgatagctgtttctcttttctttggagctgcagccttcatgtatcttaagccttctagtgcatctgtggatgaagagaaattatcaaccattttttataccattgtgggcccaatgttgaatcctttcatctatagcataaggaataaggatgttcacattgcactgagaaaaactttgaagaaaagtatgtttacttaa

SEQ ID NO: 659 - DNA, 945 bp, Mus musculus
  MOR162-3
atgacattggaaagaatggccttcagcaatgactcttctgtgaaggagtttatcctgctgggcttaacacagcagccagagctccagatgcctcttttcttcctcttcttgggaatctatgtggtctccatggtggggaacctgggattgattgttctgattgttttgaatcctcacctgcacacccccatgtactactttctcttcaacctttcttttattgatttctgctactcttctgtcataacacccaaaatgctggtgggttttgtgaagcaaaacatcatctctcatgcagagtgtatgactcagctctttttcttctccttctttgttattgatgagtgctacattttgacagcaatggcctatgacagatatgctgcaatctgtaagcccctgctttaccaggtcaccatgtcctatcaggtctgcctcttgatgacaggggggatgtatgtgatggggcttgtgggtgccatagcccacattgtttgcatgctgagactcaccttctgtgaaggctacatcattaatcattacatgtgtgacataccccctctcctgaagctgtcctgcacaagcacctacatcaatgagctggtagttttcattgttgtgggtgtcaatgtcatagttcccacattgactatttttatttcttacaccttgatcctttccaacatcctcagcatccattctgcagaaggtaggtcaaaagcattcaggacctgtggctcccatttcatagctgtttctcttttctatggagcttcagcattcatgtatcttaaaccttctagtgcatcagtggatgatgataaaatatctaccatattttatatcattgtgggcccaatgttgaatccgtttatttacagtttaaggaataaggatgtccacattgcactgagaaaaactttgaagaaaagtacgtttatctaa

SEQ ID NO: 660 - DNA, 942 bp, Mus musculus
  MOR170-7
atgaagcaaatggctacagaaaatgactcttcagtgtctgagtttattcttctgggactaacagaccaacctgagctccagttgcccctgtttgctctgtttttgctgaactacacagccacaatggtgggaaacttgactttaatgagtctcattttggtgcactcaaaccttcacacccccatgtatttcttcatcttcaatctgtccttcattgatttttgttactcatttgtctttacccccaaaatgctgatgaagttttttttagagaagaacaccatatccttcaaaggatgcatgactcaactgttttttttctgcttttttgtgaacactgagagttatgtgctgacagccatggcttatgatcgctacgtggccatctgtaagcctttattataccaggctatcatgttacctaggatctgttgtcttctaatgtttatgtcatatttgatggggtttgttagtgccatgattctcacaggcttaatgtttaggctcaacttttgcaatagcaacatcatcaatcactacatgtgtgacatcttccctcttcttcagatctcttgcagtgacacctatctcaatgagcatgtgagttctgctgtggtgggtacagctatcattttatgtagccttcttatcttaatgtcttatgctctgatccttttcaatatccttaatatgtcctcaggtaagggttggtccaaagccttgggtacttgtggatcccacatcatcactgctagtctcttttatggatctggactgcttgcttatgtcaagccatcatctcctgagactgtgggtcagggaaaatttctcactgtgttttatacatgtctggtacctgtactgaatcctctcatatacagtcttccaaacaaagatgtcaaaattgctatgaagaagaccttaaagagaatcacaagttaa

SEQ ID NO: 661 - DNA, 996 bp, Mus musculus
  MOR170-8
atgcttctacagatgcaacacatgaagcaaatgaatatggaaaatgactcttcagtgtcggagttcattcttatgggactgacataccagcctgagctccggtggcccttatttgttctgttcttggtgaactattcagccactgtgatgggaaacctgagcttaatgactcttatctttctgaattctcatctgcacacaccaatgtacttttttatcctcaatttgtctttcattgacttctgttattcatttgattttactcccaaaatgttgatgggatttgtctcagaacacaacaccatctcctttacaggatgcatgactcagttattttttttctgtctttttgttaactctgagtgctatgtgctgacagccatggcctatgatagatatgtggccatctgtaggcctctgctgtacacagtagttatgtctcccagggcttgttccctgttaatgcttgctgcacacttgatgggtgtctcttctgctattgtccacacaggatgtataattcagctcaggttttgtggttcaaaagtcatcaaccactacatgtgtgatactttccccctccttgagctctcctgtggtagcagtcatgtcaacgagcttgtaagttctgtttctgtggctgtcgttgttgttatatctagcctaattattgtatcctcatatgctttgattcttgtcaatgttatgcatttgtcatcatctaagggttggtccaaagctgtgagcacatgtagctcacatataataactgttgccctgttctatggatttggtctgcttgctcatatcaaaccatcatctgcagaatctgtagttgagaggaaatttttttcagtagtttatacttttgtgctgcctttgttgaatccgctcatttacagcctcaggaataaggatgtcaaacttgctttgaagagaacactaaagagagttacaatccaagggaagtgcttatgttgtagccataaatcatga

SEQ ID NO: 662 - DNA, 951 bp, Mus musculus
  MOR170-9
atggcaacggggaatcactattctgtgactgagtttattctcactggactgacagagcaacctgaactccagatgcccctgtttttcctgttcttggtgaactgtttaatcactgtggtgggaaacttgagtttaatgagtcttatttgctgcaattcaaaccttcagacacctatgtacttttttctcttcaatctgtcttttattgatttttgctattcatttgcctttactcccaaaacactaatgagttttgtcttagagaagaacataatttattttacaggatgcatgacacagctgtttttcatgtgcctttttgccaattcagagtgctatttggtgacagccatggactatgatcactatgttgccatctgtcaacccctgctgtacatgatcatcacgtctcctatgacatgttccctgatgatgtttggttcatacttgatgggaggtattggtgcaattgtccatacagggtgtatgatcaggctcaacttttgtggttcaaacatcatcaaccattacatgtatgatatcttcccccttctccagctctcctgcagcagcatctatgccaatgagcttgtgagttctgtttttgtaagcacagtagttcttgcatctagctttctcatcttaacctcctatgctttgattctttttaatatcactcagttatcaggtaagggtttgtccaaagccatgagcacctgtagttctcacataatgactgttgtcctattttatggatttgctatgcttacacatgtcaaaacatcatctgatgaatctgtgaatcaggggaattttttttgtctattttgtacatttttggtgcctttgctgaatccctttatttacagtctcaggaataaggaagtcaagcttgctctaaagagaacactgaggagactcacagtgagtgaatcactgggactgccatag

SEQ ID NO: 663 - DNA, 939 bp, Mus musculus
  MOR256-20
atggtcaaccagagctcccccgtgggcttcctcctgctgggcttctctgaacacccacaactggaaaaggttctcttcgtcattgtcttgtgctcctacctcctcaccctcctaggaaacacactcatcctcctgctgtccaccctggatcccaggctccactctccaatgtacttcttcctctctaacctctccttcttggacctctgcttcaccacaacctgtgtcccccagatgctgttcaacctctggggccctgcaaagaccatcagcttcctgggatgctctgtccagctcttcatcttcctgtccttgggaaccaccgagtgcatcctcctgacagtgatgtcttttgaccgctatgtggctgtctgccagcccctgcactatgccaccgtcatccaccctcgcctgtgctggaagctggcagctgtggcctggatgatgggactgcttcaatccatagttcagacacctcctaccctcaagctgcccttctgtccccataggcagatagatgacttcctgtgtgaagtcccatctttaattcgactctcctgtggggacaccacttttaatgagattcagttggctgtgtccagtgttattcttgtggttgtgcctctgagcctcatccttgtctcttacggagccattgccagggcagtgatgaggataaactccactgaagcatggaaaaaggctttgaggacctgctcctcccacctcattgtagtcaccctcttctacagctcagtaatcgctgtctatctgcagcccaaaaatccctatgcccaggagaggggcaagttctttggtcttttctatgcagtgggcacccccacactgaaccctctcatttatactctgaggaacaaggaggtaaagagggcattctggaggctgttggggaaggatggggactccaaaaatacctaa

SEQ ID NO: 664 - DNA, 933 bp, Mus musculus
  MOR256-21
atggtcaaccagagctcccccgtgggcttcctcctgctgggcttctctgaacacccacaactggaaaaggttctcttcgtcgttgtcttgtgctcctacctcctcaccctcctaggaaacacactcatcctcctgctgtccaccctggatcccaggctccactctccaatgtacttctttctctctaacctctccttcttggacctctgcttcaccacaacctgtgtcccccagatgctgttcaacctctggggccccgcaaagaccatcagcttcctgggatgctttgtccagctcttcatcttcttatctctggggacgacggagtgcatcctgctagcagtgatgtcttttgaccgctatgtggctgtgtgccagcccctgcactatgccaccgtcatccaccctcgcctgtgttgccagctggcagctgtggcctggacgattggcctagtggagtcagtagttcagacgccatccactctgcgcctgcccttctgtccccaccatcaggttgacgactttgtgtgtgaggtccctgctttgattcgactgtcctgtggggacaccacctataatgaaatacaaatggctattgccagtgtcttcatcttggttgtacctctgagcctcatccttgtctcttatggtgccattgccagggcagtgctgaggataagctctgcaaaggggcgcaggaaagcttttgggacctgctcttcccacctcattgtggtcactctcttctacagctcagtcatcgctgtttatctgcagcccaagaatccttatgctcgagagaggggcaagttctttggtctcttctatgctgtgggaactccttctcttaaccctctcatatataccctaaggaacaaggaagtaaagagggcattcaggaggctgctctggaaggaagtgaagcccggctga

SEQ ID NO: 665 - DNA, 945 bp, Mus musculus
  MOR231-13
atgggaaagaataacaatgttacagaatttattctactgggtctcactcaggatcctgttggccaaaaagcattatttgtcttgtttctactcatgtacattgtgaccatggcaggcaatttgattattgtggtaacaatcattgccagcccctccttgagctccccaatgtacttcttccttgcctatctgtcactcatggatgctatttattccactgcaatctcacccaagttgattatggacttactctgcaataaaaagactatctctttcagagcttgcatgggccaactctttgtggaacacttatttggtgcaactgagatcttccttctggtagcaatggcttatgatcgctatgttgccatttgtaaaccactgcactatttaaccatcatgaatcaccgggtttgcattctcctggtgatggcaacctgggttggagggtttgcacactccatggctcaagttctctttgtttacgatcttcctttctgtggtcccaatgtcattgaccattttgcctgtgatatgtatccattattggtgcttgtgtgctctgacacctacttccttggtcttactgtcattgccaacgatggagcaatctgtatggtggtgtttgttattctgttagcctcctatggaatcattctaaactctcttaagactcacagtcaggaagggaggcgcaaagccctgtccacttgcagttctcacatcatggtcgttatcctattttttgttccttgcattttcatgtatgttagacctgtctccaattttcctgttgataaatcagttactattttttatacagttgtcactcctatgttgaatcccttaatatacaccttgagaaattcagagataaaacattctatgctaaaactctggtctaaaatattacattcagatagactaaggaaatcttgttgttaa

SEQ ID NO: 666 - DNA, 909 bp, Mus musculus
  MOR235-1
atggatagtccacgcaatgtcacagaatttttcatgctgggtctctcccagaacccccaggtgcagaggatgttgtttgggctttttctgctggtcttcctggtctctgttgggggcaacatgctcatcattatcacgattaccttcagccccaccctaggttctcctatgtactttttcctctcatatctttcctttattgatacttgctattcctcttgtatgacacccaaactcatcgctgactccctgcatgagggaagagccatctcttttgagggctgcttggcccagttctttgtggctcatttattgggaggaactgagatcattctgctcacagtgatggcctatgaccgctatgtggccatctgcaagcccctacactataccaccaccatgaccaggcatgtctgtattgtgctggtggcagtggcttggctgggtggcatcctgcattcaacagctcagctctttctggtccttcagttgcccttctgtggtcccaatgtgataaaccactttgtgtgtgacttgtatcctttactggagctggcctgcactgacacatatgtcattggcctgctggtggtggccaacagtggtgtgatttgcctgttgaacttcctcatgctggctgcctcgtacattgtcatcctgcgcactttgaggtcccacagtgcagagggaagacggaaagctctgtctacctgtggagcccacttcactgttgttgctttgttctttgtgccctgtatatttatttacatgagaccatcatctactctgtccatagacaaaatagtagctgtgttttattgtattttgacacccatgttcaaccccctgatttatactctgagaaatgcagaggtgaaaaatgccatgaagaatctctggagaaaatga

SEQ ID NO: 667 - DNA, 921 bp, Mus musculus
  MOR234-3
atgagcaatgtcacagaatttatcctcctgggcctgacccaagacccagatctgcagaaattcttattcattgtgtgcttaataatctatttgatcacactggctggtaacatgctcatctcagtcaccatcttcatcagcccagccctggccactcccatgtacttctttctttcctacttgtccgtcatagatggtttctactcttcttccatagcacccaaaatgatctatgacctaatctctgagaagagcaccatatccttcaatggctgcatgactcagctttttgtggagcatttttttgctgcagctgaaatcatcttgctgatgtccatggcctatgatcgctatgtagccatctgcaagcccttgcactacatgaccatcatgaaccgacctctgtgtgtattcctggtgggggctgctgtaatcttaggattcatccatggagggatacagattttgtttatggcccagttaccattctgtggcccaaatatcattgatcactttatgtgtgatttaataccactcctggagttggcctgcactgacactcacactctgggacccctgatcgctgccaacagcgggtcactgtgtttactcattttctctatgctggttgcttcctatgtggtcatccttcgctccctgagaaatcacagtgcagaagggcgtcgcaaagccctgtctacctgtgcctctcatgtcaccgttgttgtcttattctttgttccttgttcatacctgtacctaaggcccatgacctccttccccactgacaaagctgtaactgtgttttgcaccctagtgacacctatgctgaaccctctgatctataccctcagaaatgaggaagtcaaaagggttatgaagaagctctggggtcgaatgaggaaagctggtgacatgtaa

SEQ ID NO: 668 - DNA, 936 bp, Mus musculus
  MOR256-22
atgggaaatttcaacaccagtacacaagagagtttcattttggtgggtttctcagattggcctcaactgcaagccttcctttttgtcattatcttgattttctactctttaactatctttggcaataccaccatcattgttcttgcaagactagaccttcgactgcacaaacctatgtacttcttcctctcccacctctccttcctggacctctgctacaccaccagcaccgtgccccagctcctcatcaacctccgaggacttgacaggaccatcagctatggagggtgtgtggcccagctcttcattttccttgctctggcctccacagaatgtttgattttggtggcaatggcctttgaccgctatgctgctgtgtgtcatccactccactataccagcattatgaaccccatcctctgcagggcactggccatctcctcctgggtgggaggccttgtgaactctctgatccaaacagggcttgtgatggccatgcgactctgtggccatcaaatcaatcacttcttctgtgaaatgcccatattcttgaagttggcctgtgaggacacagaaggaacagaagctaagatgtttgtggctcgaacaattgtcttggtgtgccctgcagtactgatactaggctcctatgttcacattgctaaggctgtactgaaagtcaagtcaatggctggacgcagaaaggcttttgggacttgtgggtcccacctcatggtggtttctctcttttatggctcaggtatttatacatatcttcaaccagtccatagatattctgaaagcaagggaaagtttgttgcccttttttatactattgttacccccatgttcaatcctttgatctatacgctgaggaacaaggatgtgaagggggctctgtggaagttgctagggagaggcacagactctgggtag

SEQ ID NO: 669 - DNA, 957 bp, Mus musculus
  MOR256-23
atgggaagtttcaatctcagcttagaaggtttcctgttggtaggcttctcagactggcctcaactggaacttatcctcctggtcttcatttcgattttctactctcttaccctctgtggcaacatcaccattattgttctcactcaacaagaccttcatctgcacacacccatgtacttcttccttgcccacctctccttcctggacctctgcttcaccagtagcactgtgcccaaacttctaatcagtctttcccgaggtgatcagactatcagctatgctgggtgcatgacccagttcttcatagcactcttactgggtggaactgagtgtgtgctccttgtggtgatggctttcgaccgctatgtcgctgtgtgtcgtccactacactacaccagcattatgcacccccttctctgccatgcattggccatctcctcctgggtgggaggccttgtgaactctctgactcagacaagtctcatcatgaccatacctctctgtggccatcacctgaaccacttcttctgtgagatgcttgttctcctgaagctggcttgtgaggacacagtgggaacagagacctacttgttttgggctggagctgtaattttggtctgtcctgtagcactaattctaggcacctatgcacacattgctcatgcagtgttgaagatcaagtcaagatctgggcgcagaaaggctctgggaacttgtgggtcccaccttactgtggtttttcttttttatggctcagccatgtacacgtatctccagcctatccacacgtattctggtagtgaagggaagtttgctgccctcttttatactatcattactccaatgctgaaccctctgatttataccctaagaaacaaggatgtaaagggggctctgtgcaaggtacttgtaaaaggaaaaaaggagactaagactagaagaaagatggttgaataa

SEQ ID NO: 670 - DNA, 936 bp, Mus musculus
  MOR256-24
atgggaaccttcaacaccagtttgggaggaggcttcattttggtgggcttctcagactggcctgcactagaactcatcttctttattcatattttgattttctactctataactctctttggcaacacagccatcattgctctctcccgaacagaccttcgactgcacacccccatgtacttctttctgtctcacctctccttcctggacctctgcttcaccaccagcaccgtgccccagctcctcatcaacctgcatggacaagacaggaccatcagctatggagggtgtgtggcccagctgtttatatttcttgctctgggatccacagagagtgtgctcctggtggtgatggcttttgaccgctatgttgctgtgtgtcgtccactgcactatactaccatcatgcaccctgttctctgccaggcattggctattgcttcctgggtaggaggcttcttgaactctctgattcaaacaggcctcatgatggccatgccactctgtggacatcgactgaatcacttcttctgtgagatgcctgttttcctcaagttggcctgccaggacacaggaggaacagaggccaagatgtttgtggccagagtggtgattgttgcagtgcctgccatgctcattctaggctcctatgcacagattgctagggcggtgctgaaggtcaagtcagtggctgcacgcagaaaggctgctgggacttgtggctcccacctcctggtggtatctctgttctatggctcagccacctacacatacttacaacccaaagacagctattctgagagcaaggggaagtttgtggcccttttttatactatcatcacccccatgttcaaccctctgatctataccctgagaaacaaggatatgaagggggctctgtggaaggtattaggaagagctgcagccacagggtag

SEQ ID NO: 671 - DNA, 936 bp, Mus musculus
  MOR256-25
atggaaagcttcaacatcagtttgggtaaaggcttcattttggtgggcttctcagactggcctgcactagaactcatcttttttatttatattttgattttctactccctaactctctttgggaacactgccatcatcgctctctcccgaatggaccttcaactgcacacccccatgtactacttcctctgccacctctccttcctggacctctgcttcaccaccagcaccgtgccccagctcctcatcaacctccatggacaagacaggaccatcagctatggagggtgtgtgtctcagctcttcataactcttgctctgggatccacagagagtgtgctcctggtggtgatggcttttgaccgctatgctgctgtgtgtcgtccactgcactacatgaacatcatgcaccccgttctctgccaggcattggctattgcttcctgggtaggaggcttcttgaactctctgattcaaacaggcctcatgatggccatgccactctgtggacatcgactgaatcacttcttctgtgagatgcctgtcttcctcaagttggcctgccaggacacaggaggaacagaggccaagatgtttgtggccagagcagtgattgttgcagtgcctgccatgctcattctaggctcctatgcacagattgctagggcggtgctgaaggtcaagtcagtggctgcacgcagaaaggctgctgggacttgtggctcccacctcctggtggtttctctgttctatggctcagccacctacacatacttacaacccaaagacagctattctgagagcaaggggaagtttgtggcccttttttatactatcatcacccccatgttcaaccctctgatctataccctgagaaacaaagatatgaagggggctctgtggaaggtactaggaagagctgcagccacagggtag

SEQ ID NO: 672 - DNA, 936 bp, Mus musculus
  MOR256-26
atggaatatttgaacaccagttcagaagagggcttcattttagtgggcttctcagactggcctcacctagaaccaaccctttttgctttcatttctattttctactctctgactctctttggcaacaccgtgatcatcattctgtctcgactggacctccgcctgcacacacccatgtactacttcctctgccacctctccttcctggacctctgctacaccaccagcactgtgccccagcttctggtcaacctctctggacttgacaggaccatcagctttggaaggtgtgtggcccagctctgcatagtgctctcactgggaggaactgagtgtgtgcttttggtggcaatggctatagatcgctatgctgctgtgtgtcgcccactccactacacaaccattatgcaccctgttctctgcagagcattggttgtattctcctgggtggggggccttgtgaactctctgatccagacaagccttgtgatggccatgcctctgtgtggacaccaactgaatcacttcttctgtgagctacctgttctcctgaagatggcctgtgaggacacaggaggaacagaggtcaatttgtttgtggcccgggtcataatcttagtgtgtcctttactgctaattctaggctcctatgctcacattgccagggcagtgctgaacatcaggtcaatggctggtcgcagaaaggcttttgggacgtgtgcatctcatctcattgtggttgccatgttttatggctcagccatctccacatacctccaacctgtccacaggtattctgagaaggagggaaaatttcttgcccttttttatactatcatcacccccatgctcaaccctctgatctatacgctgaggaacaaggatgtgaaaggagccctgtggaaggtgctagggagaggcacagactccaggtag

SEQ ID NO: 673 - DNA, 936 bp, Mus musculus
  MOR256-27
atgggaagctttaatgccagtttgggtaaaggcttcattttggtgggcttttcagactggcctcaattagaactcattctttttatctatgttttgattttctactccttaactctctttggcaacaccaccatcatcgctctgtcacaactggacattcgattgcacacccccatgtacttcttcctctcgcacctctccttcctggacctctgctacaccacaagcaccgtgccccagctcctgatcaatattgctgcacaggatcataccatcacctatggaaggtgtgtggcccagctgttcagtgtccttgccctgggctctacagagagtatgcttctagtggtgatggcctttgaccgctatgcagctgtgtgccgtccactacactacacaaccattatgcaccctcttctgtgccaggctttagctatctcttcttgggtagcaggcctcgtgaactctctgatccagacaggtctcatgatggccatgcctctctgcaggtatcgactgaatcacttcttctgtgagatgcctgtcttcctcaagttggcttgcaaggatacagctggaacagaggccaagatgtttgtggcgagagccataatcttggtattcccagcaacattgattctaggatcgtatgcccacattgccagggctgtactgaaggtcaagtcaacatctggtcgcagaaaagcttttgggacgtgtggatcacacctccttgtagtttctatgttttatggctcaaccatctacacgtacttgcaaccaaatgacagttattctgagaatgagggaaagtttgtggcccttttttatactatagttacccccatgctcaaccctctgatctatacactgaggaacaaggatgtaaagggggctctgtggaaggtgctagggagaggcacagactccaggtag

SEQ ID NO: 674 - DNA, 936 bp, Mus musculus
  MOR256-28
atgggaaccttcaatttcagttcagacagggccttctttttggtgggattctcagattggcctcacctggaacttgtcttttttgtcgccatttcaattttctactccctcactctctttggcaactcatccatcattgctctctctcgactggaccttcgactgcaaacacctatgtacttcttcctctgccacctctccttcctggacctctgctacaccacgagcaccgtgccccagctcctcatcaacctccatggacaagacaggaccatcagctatgaaaggtgtgtggctcagctcctcatttttcttgccctggcatctacagagtgtgtgctattgggggtcatggcctttgaccgctatgctgctgtgtgtcgtccactgcactacacgaccattatgcatccccagctgtgtcatacactggccatctcctcctgggtagggggccttgtgaactctctgactcagacaggcctcatgatggtcatgcctctctgtggctatcgactgaatcacttcttctgtgagatgcccatattcctcaagttggcctgtgaggaaacaaaaagaacagaggccaagatgtttgtggcccgaacaatagttttggtctgccctgcggcacttatcctgggttcctatgctcatatcaccagggcggtactgaaggtcaagtcaacagctggacgcagaaaagcttttgggacttgtggatcccacattctggtggtctctctgttttatggttcagccatttacacataccttcagcccactcacacctattctgaaagtgagggaaagtttgttgcccttttttatactatcatcacccccatgctcaatcctctgatttatacgctgaggaacaaggatgtgaagggggctctgtggaaagtgctagggagaggcacagactctgaataa

SEQ ID NO: 675 - DNA, 942 bp, Mus musculus
  MOR279-1
atgatgcaatggaacaactggaccaggaactctgatttcatcctactaggattttttgatcacagtcctcttcatacttttttcttttctctcatcctggctatcttcttcatggccctcataggaaattctgtcatggtgattctcatctacctggatgcccaactccacacccccatgtatatccttctcagccaactttctctcatggatctcatgctcatctctaccacagtaccccaaacggccttcaacttcctttctggcaacaagtccatctccatggctggctgtggagtccagatatttttctatgtatctctacttggagctgagtgttttttattggctgcaatggcctatgaccgttatgtagctatttgttacccattaaggtaccctattctcatgagtcacaaaatctgtagtctaatggctgccttctcttggattcttggctcccttgatggtataatcgatgttgcagctgtactatctttttcatattgtggtaccagagaaatacctcactttttctgtgatatccctgccctgctaactatttcatgtagtgataccttgatatttgaaaagattatatttttctgctgtgtaattatgcttatcttccctgtagtcattgttattgcatcctatatctgtgtgattcttgctgtcattaaaatggcttcagctgagagtcgtcacaaagcttttgccacctgttcatctcacgtcatggtggtggtaatatactatggggcagccatgttcatatacatgcagccctcttctagtcgttctcccaatcaagacaaactagtgtcagctttctacaccattcttactccactgttgaaccccctaatttacagcctccgcaacaaagaagtagccagggcattcatgaaggtattaaggatggataaggcagcaggatga

SEQ ID NO: 676 - DNA, 963 bp, Mus musculus
  MOR156-5
atgcaaatttcatcttcaataataagcccaaggatgaactgcagtcaggctcctggctttatcctcttgggactacccagagaaccagagaagtggcagcacttctttatcatcttcctaggtctctacttgctaggccttttagggaacctgctacttctgttagctattggttctgatgtccacctccacacccccatgtatttcttcctcagtcagctctcacttgtggatctttgcttcatcaccaccacagctcctaaaacactggagacttggtggactggagatggatcaatctcattctctggatgcctgactcaattgtatttctttggtgtttttgcagatatggataacctgcttctggcagtcatggctattgaccgctatgctgctatctgccacccactcctctacccacttctcatgactccttgtagatgtgaggttctagtcagtgggtcatggggaatagctcattgtgtgtctctgatgtatacgttattgctctctcagttatattttcataccaatcaagagattcctcattttttctgtgattgtaggcctctcttactgctttcctgttctgacactcacctcaatgaggtcctgatgatggctttggctggagttttgggagtcagtgcagttctttgcattgtaagttcttatggttgtattttttatgctgtggctagagttccatcagcacaggggaaaagaaaagccctgaccacatgcagttcccacctctctgtagtcctccttttctacagcacagtctttgctacctacctgaagcccccatctacttctcactcctctggggaggtggtagctgctgttatgtataccttggtcactcccactctaaaccccttcatttatagtctgaggaataaggatgttaagagttcattgagaagagttctgaacattgaaaagtctcaggactaa

SEQ ID NO: 677 - DNA, 966 bp, Mus musculus
  MOR225-5
atgtggattcacctagaattcatggaaaatcataaaaatgttacagagttcatttttatgggtctttggcagaatagacaaatagagctgctgttctttctcttgttcctgctttgctatctggctatcttaatggggaactctgtcatcctatttaccatcacctacagccacctaatagaacaaccaatgtattattttctctgccatctttccctcatggacctctgctacacctccactgtgattcccaggctcgtcagagacttggccacaacaagaaaaaacatttcctataatgagtgcatgacccagctcttcactgcccacttgctggcaggtgtggaaatcttcatcctggtgtccatggccttggaccgctatgttgccattgtcaagcccctgcactacatggttatcatgagcaggaagagatgtgatatgttgattgtcacggcctggatactggggttctggcactccattgctttactactgatggtgctcagtctgccgttctgtggtcccaaccacatcaatcactacttgtgtgacatcaagcctcttctgaaattggtctgtaaagacgttcatgttgtaagtatcttagcaattgccaactctgggatggtgctttttgctatttttattgtactacttgcctcttacatactcatattgtattctctgaggacaagatcatctgcagggaagcgcaaagcactctctacctgtagttcacacataatggtagtagttttattttttgggccctgtatttatatctatattttacccgcaggaagtgagaacaaggataaggaaatttctgtgttttacactgtgattgccccaatgttgaatccccttatctatactctgagaaacagtgagatgaaaagtgccatgcacaaggtgtggtctcggctgtcactcagagttgaagtaagtgaaagaatattgtga

SEQ ID NO: 678 - DNA, 930 bp, Mus musculus
  MOR232-6
atggaaattaagaacaacgtgaccgagtttgttctcctggggctcacacagaatccgcagttgcagaaaatcttgtttgttgtgtttttggttatctatgttttctctgtggcaggaaatttgctcattctaatcaccattacaaacagccaactgttggggtaccctatgtattacttcctggcctatctctcttttattgatgcttgctactcctctgtcaatacacctaaactgcttgctgatactttccataaaaggaaatctattaaattcaatggatgcatgacccaagtttttgcagaacatttcattggaggaactgaagtcatcttgcttactgtgatggcttatgaccgctatgtagccatctgtaaacccctgcactatgcaaccatcatgaacagacgactctgtaacatcctagtgggagtgtcatgggttggaggctttcttcatggaggtatacaaattcttttcattattggattacctttctgtggccctaatgtcatagaccattttatgtgtgatctgaaccctttgcttgatctagcctgtattgacacccacatcctggggctttttgttgctgccaacagtggtttcatttgtctgttaaatttcctcctactgcttgtctcctacctggtcattcttaactccctaaggagccacagtgcagaaggcaggcgcaaagccctctctacctgtgtttctcacattacagtagtggttttattttttgtgctctgcatatttgtgtacatgagacctgcagctacattacccattgataaagcagtcgctttgttttatactatgataacccctatgttgaatccattaatctataccttaagaaatgctcagatgaaaaatgctatttggaaattgtttagtgtaaaagttcagtcagatgacaaataa

SEQ ID NO: 679 - DNA, 930 bp, Mus musculus
  MOR232-7
atggaaattaagaacaacgtgaccgagtttgttctcctggggctcacacagaatctgcacttgcaaaaaatagtatttgttgtgtttttggttatctatgttttctctgtggtaggaaatttgctcattgtaatcaccattacaaacagccaactgttggggtaccctatgtattacttcctggcctatctctcttttattgatgcttgctactcctctgtcaatacacctaaagtgattgctgattcactccataaaaggaagtctattaaattcaatggatgcatgacccaagtttttgcagaacatttcattggaggaactgaagtcatcttgcttactgtgatggcttatgaccgctatgtagccatctgtaaacccctgcactatgcaaccatcatgaacagacaactctgtaacatccttgtgggagtgtcatgggttggaggctttcttcatggaggtatacaaattcttttcattattggattacctttctgtggccctaatgtcatagaccattttatgtgtgatctgaaccctttgcttgatctagcctgtattgacacccacatcctggggctttttgttgctgccaacagtggtttcatttgtctgttaaatttcctcctactgcttgtctcctacctggtcattcttaactccctaaggagccacagtgcagaaggcaggcgcaaagccctctctacctgtgtttctcacattacagtagtggttttattttttgtgccctgcatatttgtgtacatgagacctgtagctacattacccattgataaagcagttactttgttttatactatgataactcccatgttgaatccattaatctataccttaagaaatgctcagatgaaaaatgccatttggaaattgtttagtgtaaaagttcagtcagatgacaaataa

SEQ ID NO: 680 - DNA, 933 bp, Mus musculus
  MOR230-7
atgtggctgaataacaatgtgactgaattcattttacttggtttgacacaggatccttttaggaagaaaatcctatttgttgtgtttttgcttttttacatggggacattactgggtaacttgcttatcattgctacaatcaagacaagccagacccttgggagtcccatgtacttcttcctgttctacttatccttgtctgacacctgcttctctacaaccatagctccaagaacaattgtggactctttgcttaatgaagcctctatatctttcactgagtgcataatccaagtctttacatttcatttctttggctgtctggagatctttatccttatcctcatggctgtggaccgatatgtggccatctgtaagcccctgcactacatgaccatcatgagccgccgggtctgtggggtgttggtggccatagcctgggtgggatcctgtgtgcattctttagttcagatatttctggccttgagtttgcccttctgtggccccaatgaaattgatcactatttctgtgacttgcagccactattgaagcttgcctgttcagacacatatttgatcaacctgcttctggtgtccaacagtggagccatttgtacagtgagtttcctcatgctgattgtctcttatgtcattattcttcgttctctaagaaaccacagtgctgaagggaggaggaaagccctatctacctgcatatcccacattattgtggtcatcctgttctttggaccttgcatctttatatacacacgccctgcaacaacatttcctatggacaagatgatagctatattttattcaattggtacacctttgctcaatcctctgatttacacactgaggaatgcagaggtgaaaaatgccatgaagaagttatggagaaagaaagtggtctcagatgatcgaaagtaa

SEQ ID NO: 681 - DNA, 957 bp, Mus musculus
  MOR226-1
atggcctcaaggacttattccatggaagaagtaaataatgtcactgaattcattttcttgggtctttctcagaaccctgaggttgaaaaagtgtgctttgtggtgttctccttcttttacatggtcattctgctaggaaacctcctcatcatgttgacagtttgcagtggcaatcttttcaagtttcccatgtattttttcctcaactttctgtcttttgtggacatttgctactcctcagtcacagcacccaagatgattattgacctgttagtgaagaaaaagactatatcttatgtggggtgcatgttacaactctttgtggttcatttctttggttgcactgagatcttcattcttactgtcatggcctatgatagatatgtggccatttgtaaacctctccactatatgactattatggaccgggaaagatgcaataagatgttgctcggaacatggatcggtggcttcttacattctattatccaagtggctcttgtggtccagctccccttttgtggaccgaatgagattgatcactatttctgtgatgtacatcctgtactgaaacttgcctgcactgacacttacattgttggtatttttgtgacagccaacagtggcaccattgcattgggaagttttgtcatcttgctgatctcatacacagtcattctcatgtctctgagaaagcagtcatccgaaggcagacgcaaagctctctccacttgtggatcccacattgctgttgtcatcattttttttggcccctgtacttttatgtatatgcggcctgacactaccttctctgaggacaagatggtagctacattttacaccattatcactcccatgctgaatcctctaatttacactctaagaaatgcagaagtaaagaatgcaatgagaaaactgtgggctagaaagttttcctgggaaactactgggaaatag

SEQ ID NO: 682 - DNA, 939 bp, Mus musculus
  MOR233-13
atgcaaaaccaaaccattgtaactgagtttgtactcctgggactttcacaaaacccaaaagttgagaagctcctatttgttatatttttgttgctctatcttgcaacaattggaggcaacatgacaattgtggtgaccattgcttcgagtcctgtgttgcttggttcccctatgtacttcttcttggcattcttgtccttattggatgcatgtgtctcctctattgtcacacccaagatgattatagatttattctataagagaaagaccatctcctttgaatgttgcatgatgcaagtcttttctgtccacttcttcagtgctgtggaggtgatcattctggcagctatggcttatgaccggtatgtagccatttgtaagcccttgcactactcttcaattatgaacaggaggctctgtggcatcctagtggggatagcctttgcagggggatttttgcattccatcatacaaattatcttcactttgcagttgccattttgtggacccaattttattgatcatttcatatgtgacttgttcccattgctgaagcttgcttgcactgacacacacatatttgtaattttagtgtttgctaacagtgggtctatctgcatcattatcttttcctttttgcttgtttcctatgttgtcatcttgttctctctgagaacccacagttctgaagggagacgtaaagctctctctacctgtgggtcccacattactgttgtggttttgttctttgttccatgcatattaatatatgcacgacctacatctccattctctttggagaaaaatgtatttatatttgctgatgtcttgacaccattactcaatcctgtggtttacactttcaggaataaggaaatgaagaatgccatcagaaaaatgtggagaagtttattagtggctcctgacatattaaaataa

SEQ ID NO: 683 - DNA, 933 bp, Mus musculus
  MOR230-8
atgcagctgaatatcaatgtgacagaggtcattcttcttggcttgacacaggaccccagcaggaagaacatagtgtttgccattttcctgctcttttacatggggaccttactgggcaacttgcttatcattgttactgtcaagacaagccaggctcttgggagtcccatgtatttcttcctgttctacttatccttgtctgacacctgcttctctacaactgtagctcctagaacaattgtggattccttacagaaggaggcctctatctctttcactgagtgcataatccaaatctttacatttcatttctttggctgtctggagatctttatccttatcctcatggctgtggaccgatatgtggccatctgtaaacccctgcactacatgaccatcatgagccgccgggtatgtggggtgttggtggccatagcctggatgggatcctgcgtgcattctttagttcagatattcctagccttgagtttgcccttctgtggccccaatgtgattgatcactatttctgtgacttgcagccattattgaaacttgcctgttcagacacatatttgatcaacctgcttctggtgtccaacagtggagccatttgcacagtgagtttccttgtgctaatgttctcctatgtcattattcttcattccctaagaaatcacagtgctgaagggaggaggaaagccctatctacctgtatatcccacattattgtggtcatccttttctttggaccttgcatctttatatatacacgccctgcaacaacatttcctatggacaagatgatatctatattttattcaattggaacacctctgctcaatcctctgatttacacactgaggaatgcagaggtgaaaaatgctatgaagaagttgtggagaaagaaaatcgtgtcagatgataaaaagtaa

SEQ ID NO: 684 - DNA, 927 bp, Mus musculus
  MOR160-2
atggcctggagcaaccacagcgtcatcacggagttcgttctcaccgggctctctgacgaccccctgatcccggctctactttttgctctattcctggggatttacgtcctcaccatgacggggaacctgacgatgctgctggtgatcacggctgactcccacctccacacacccatgtacttcttcttaagcaatctgtcgttcgtagatctctgcttctcatccgtcacggtaccgaaactgctgaaggacctcctatcggcgaagaaaaccatctcaatagaaggctgcctggctcaggtcttttttgtgtttttttcttctggtactgaagcctgcctgctctctgtcatggcttatgaccgctatgctgccatctgccatcccctgctctacggccaggtgatgagaaatgagttgtgtgtaaggcttgtggtcatctcatggggcgtggcctctctcaacgcaaccatcatcgtgctcttggctgtcaacctggacttctgtggggctcaaaccattcaccactacacctgtgagctgcctgcccttttccccttgtcctgttccgatatctccatcactgtcgtcgtcctgctttgctccagcttgctgcatgggctgggaacctttatccctatcttcttctcctatgcccgcattgtctccgccatcttgagcatcagttccaccaccgggaggagcaaggccttctccacctgctcttcccacctcgctgcagtgaccttgttctttgggtctggctttctttgctatctcatgccgccttctggttcttctctggacttgctcttgtcgttgcagtacagcgcagtcacgcccatgctgaaccccctcatctacagcctgaagaaccaggaggtgaaggcggctgtgcagaggaccctgagaaagtatttgctttag

SEQ ID NO: 685 - DNA, 921 bp, Mus musculus
  MOR256-29
atggtcaaccagagctcccctgtggtcttcttcatgctgggcttctctgaacacccacaactggaaaaggttctgtttgtcgttgtcttgtgctcctacctccttaccctcctaggaaacacactcatcctcctgctgtccaccctggaccccaggctccactctccaatgtacttcttcctctctaacctctccttcttggacctctgcttcaccacaacctgtgtcccccagatgctgttcaacctctggggccctgcaaagaccatcagcttcctgggatgctttgtccagctcttcatcttcatgtccctgggtacaacagagtgcatcctcctgactgtaatggcctttgaccgctatgtggctgtgtgccaacccctgcactatgccaccaaaatcaacccccacctatgtcgccagttggcaggtatagcttgggctataggtttggtccaatccatagttcagacacctcccaccctcaaactgccattttgttcctacaggcagatagacaactttctgtgtgaagtcccatctctaattcaactctcttgtggggacaccacctataatgagatccagatggctgttgctagtatcttcattgtggttgttcctctgagcctcatccttgtctcttatggtgccattgccagggcagtgctgaagataagctctgcaaaggggcgcaggaaagcttttgggacctgctcatcccacctcattgtggtcactctcttctacagctcagtcattgctgtttatctgcagcccaaaaacccgtatgcccgagagaggggcaagttctttggtctcttttatgcagtgggcacccccacactcaaccctcttgtatacaccctgaggaacaagggaggtaaaaagagcattctggaagctgctaaggaaagatga

SEQ ID NO: 686 - DNA, 945 bp, Mus musculus
  MOR231-14
atgggacagagaagcaatgtcacagagttcattctcctgggcctcactcaagatcatgttggacaaagagcattgtttgtcatgtttttactcatctacattgtgactatagtaggtaatctactcattgtggggacagtcatagccagtccctccttagggactccaatgtacttcttccttgcctatctgtcacttctggatgctgtttattccactgctatctcacccaagttgatggtagacttgctctgtgatagaaaaacaatttccttttcagcttgcatgactcagctctttttagagcacctacttggtggtgctgaggtcttccttctaatggtgatggcctatgatcgttatgtggccatctgtaaaccactgcattatttgatcatcatgaataggcgggtttgcttcctcctattggtggtttcctgggctggaggccttgcacactctgtagctcaacttctctttgtatataatcttccattttgtggtccaaatgtaattgaccactttatctgtgacatgtacccattattaggacttgcatgcacagatacacatattattggcctcactgtggttgccaatggtggagcaatatgtatgttagtctttattattctcataatttcctatggaatcattctaagatctcttaagactcacagtcaggaagggagacagaaagccttatctacctgcagctcccacatcatggtggttgtcctcttttttgttccctgtatcttcatgtatgttagacctgttcacaactttcctattgataaatccattactgttttttatacaattgttactcctattttgaatcctttaatatatgccttgagaaactcagagatgaaaaggtctatggaaaatctattatataaggtattccctagagataaaataacaatgtcttttcattga

SEQ ID NO: 687 - DNA, 942 bp, Mus musculus
  MOR235-2
atggagctccacagtcctcccagtaatgtgactgaatttgttctcctgggtctcacacagaatccacgcttgcaaaaaatactgttcattgtctttttgtttgttttcctatttaccgtgttggctaatctgctcattgtcctcaccatctccttcagccccaccctttcagctccaatgtacttctttctcacttacttgtcctttatagatgccttctacacctctgttaccacccccaaaatgataattgaccttctctaccagaggaggacaatatccttggctggatgtctgactcagctctttgtggagcacttcctgggaggatcagagattatcctcctcattgttatggcctatgaccgctacgtggccatatgcaaacctctgcattatatgaccattatgcgtcaaggcctctgcagactcctggtggtggtagcctggattggagggatcttacatgccaccatgcaaatattttttatgattaatctgcccttctgtggccccaatgtcattgaccacttcatgtgtgatctcttcccattgttgaaacttgcctgcagagacacacataagctgggcatcatagtggccgccaacagtggggctatgtgctttctcatttttaccatgcttctcatctcatacatagttatcctgcgatccttgaagtctcatagttctgaagggagacgcaaagctctttccacgtgtggctctcactttactgtggtggttctcttctttgtcccttgcatatttacttacatgcgccctgtgactacctacccagtggataagctggtgactgtgttttttgcaattctcactcccatgttaaatcccatcatttacacagcaagaaacacggaggtgaagaacgctatgaggaatctattgaagaggcaagtcacttaccctgttctaaaatga

SEQ ID NO: 688 - DNA, 951 bp, Mus musculus
  MOR283-8
atggagccctggaactccaccttgggaagtggcttcatcttggtggggattctggatggcagtggctctcctgaactgctctgtgctacaattgctgccctgtacatgttggcactgatcagcaatggaatgctgatcctggtcatcacaatggatatttacctccatgttcccatgtacctcttgcttgagcagctatctctcatggaccttcttctcgcctcagttatcagtcccaaagctgtcatggactttctgctcaaagacaacaccatcacctttggtggttgtgcccttcagatgttcttggaactggcactgggtagtgcagaggacctccttctggccttcatggcttatgacaggtatgtggccatttgtcatccattgaactacatgatattcatgaggccaagcatctgctggcttatggtggccatctcctggattccagcttctctgagtgccctgggatataccatctacactatgcagtaccccttctgcaaatcccgggagattagacaccttttctgtgagatccccccattgctgaagctggcctgtgcagacacctccagatatcaactcatggtttatttgatgggtgtgaccttgctcatccctcctcttgctgccatactggcctcctactcactaattctgttcactgtgctcaaaatgccctcaaacgagggaagaaagaaagcccttgttacctgctcttcccacctgactgtagttgggatgtactatgggcctctcacagtcatgtacatcctgcctagttcctaccacagttccaaacaagaaaatatcctctcttttttgtacacaattgtaacgccagctctgaatcctttaatctacagtttaagaaataaagaggtcagtggggctttgaagagagtcctaggaaaacggttgttgtcaacacaccctaacttctag

SEQ ID NO: 689 - DNA, 948 bp, Mus musculus
  MOR283-9
atggaagtctgcaactccaccctgggaagtggattcatcttggtggggattctggatgacagtggttttccagagctgctctgtgccactatcacagccctgtactttttagccataaccagcaatggactgctgcttctggtcatcaccatggatgcccggctccatgttcccatgtatcttctgctatggcagctctctctcatggacttgcttctcacatcagtcatcactccaaaggccatactagattatcttctcaaagataacactatctcatttgggggatgtgcccttcagatgtttctggaactgacacttggtagtgcagaggacctccttctggccttcatggcctatgacaggtatgtggccatttgtcatcctctgaactatacaatcctaatgagtcagaaagtctgctgtctcatgatagccacctcatggatccttgcatctctcagtgctctaggatatagcatctacaccatgcaatatcctttctgcaagtccaggcagatcagacacctcttctgtgagattcctcccttgctaaagctggcctgtgcagacacctccacatatgaactcatggtttatgtgatgggtgtgaccttgctcatcccccctcttgctgccatcctggcctcctactcactaattctattcactgtgctgcacatgccctcaaatgagggcaggaaaaaagcccttgtcacctgctcttcccatctgactgtggttgggatgtggtatgggggtgctattgtcatgtatgtattacccagttccttccacagccccaaacaagacaatatcagctcagttttttatacaattttcactccggctttgaatcccctcatctacagcctaaggaataaggaggtcactggggctttgaggcgagtcctggggaaaaggttctcagtacagtctacattctag

SEQ ID NO: 690 - DNA, 948 bp, Mus musculus
  MOR279-2
atgctcatgatacaatggaacaactggaccaggaactctgatttcatcctactaggattatttgatcacagtcctcttcatacttttttcttttccctaattctgggtatcttcttcatggccttcataggaaattctatcatggtgattctcatctacttggatgctcatctccacacccccatgtacatccttctcagccaactttctctcatggatctcatgctcatctgtactacagtaccccaaatggccttcaacttcctttctggaaacaagtccatctccatggttggctgtggaatccagatattcttctatgtatctctacttggagctgagtgttttttgttggccgcaatggcttatgaccgttatgtagctatttgctacccattaaggtaccctattctcatgagtgacaaaatatgtggcctcatggctgcctcctcttgggttcttggctctcttgatggtataatagaagttgcagctgcattgtctttttcatattgtggtgccagagaaatacctcattttttctgtgatgttcctgccttactcacactttcatgtagtaataccttgatatttgaaagaattatatttttctgctgtgtaattatgcttactttacctgtagcaatcattattgcttcctatactcgtgtgattctgaccgttcttcatatgagctcagctgagagtcgccacaaagcttttgccacctgttcctctcacctcatggtggtgggaatgtactatggggcagccatgttcatatacatgcggccttcttctggtcgttctcccacccaggacaaaatagtgtcagctttctacactatccttacgccaatgttgaaccccctcatttatagtctccggaacaaagaagtagccagagcattcatgaaagtgttagggattgataaggcagcagcatga

SEQ ID NO: 691 - DNA, 939 bp, Mus musculus
  MOR245-2
atggaaggaacaaatcgctctgttgtgtcagaatttatgttcgtgggactcaccaactcctggaagatgcaagtgcttctctttgtgtttgcttcggtgttttatatggctagcatgatgggaaactccctcatcattttcacagtggcttctgacccccacttacattctcccatgtacttcctgttggccaatctttccttcattgatttaggtgtttcatgtgtcacttgtcccaagatgatttatgacctgttcagaaagcacaaagtcatctcctttagaggttgtatcactcaaatctttttcatccatgtcattggtggtgtggaggtggtgctgctcataggcatggcatatgatagatatgtagccatatgcaagcctctccattatctgaccattatgaatgcaaaaatgtgcattttcatcttagtgtctgcctgggtggttggccttatgcattctctggttcaatttgtttacatagtaaatttaccattctgtggaccaaatattttggacagcttttactgtgaccttcctcggttcatcagacttgcttgtgtagataccaaccaattagaattaatggtttcagccaatagtggcttcatctctgtaggctccttcttcatactagtcatatcttacattgtcataatagtcactgtccagaaacattcctcaagtggttcctccaaagctttgtccacactttctgctcatatctctgttgtggtcctgttctttggtcctttgatatttgtctatacatggccttccccctccacacacctggataagtacctggctatatttgatgctgttggtactccttttctgaaccctgtgatctacacactgaggaatcaagatatgaagacagctatgaaaagagtttgcagacagctattaaaatatgggaagatctcctaa

SEQ ID NO: 692 - DNA, 939 bp, Mus musculus
  MOR245-3
atgggtgaagcaaactgctctgtggtatctgagtttgtgttcctgggactctccaactcatgggcaatccaactatttctcttcttcttttcctgtatattctacgtggcaagtctgttgggaaattttcttattgtgctaactgtaacctcagaccctcagttacaatcccctatgtacttcctattaggcaatctttccatcattgacttgatattttgttcctccacaacaccaaagatgatttatgaccttttcagaaggcacaaaaccatctcttttgggggttgcatcactcagatcttttttatccatgcagtaggtggcaccgagatggtgctgctcatagccatggcgtttgaccgatatgttgccatatgtaagcctctgcactacctgaccatcatgagcccacaaaagtgtattttgattttggttgcttcttggattattggcttcatccactcagtgactcagctgagttttgtggtagacttgcccttctgtggccctaatgaactagacagctttttctgtgaccttcctaggtttattaaacttgcttgtgtggacacatacacactggggtttatggttactgctaacagtgggttcatttctgtggcctcctttttaattctgatcatctcttacatatttattttggtgactgttcaaaagaaatctttgggtagtttaggtaaggccctctccactttgtcagctcatgtcattgtggtagttttgttctttggacccttaatcttcttctatacatggccatttccaacatcacatctggataaatttcttgccatctttgatgcagttattactccttttctaaatccagtgatttatacacttaggaataaagaaatgaaggtagcaatgagaagactatgcagtcagtttgttaattacaataaaatttcttaa

SEQ ID NO: 693 - DNA, 951 bp, Mus musculus
  MOR245-5
atggatggaggaaatcactcagtggtatcagaatttttgttactaggcctcaccaattcatggagaattcagattctcctttttctgttcttcacagtattttatgtggcaagtatgctggggaacctgctcattgtgctcacaatcatctcagaccaccacctgcactcccccatgtacttcctgctggcaaacctctccttcattgatacaggtgtgtccagcatcgctactccaaagatgatttatgacctcttcaggaagcacaaagtcatctccttgaacggatgcatcactcagatgttcttcatccacactgttgggggaacagagatggtgttgctcatagtcatggcctatgacaggtacattgctatctgtaagcccctccactacctgaccatcatgagtctcagaatgtgcattgttcttttggctcttgcttggatcattggccttatccattctgtggcccaattggcttttgttgtaaatttacccttttgtggagctaataaaatggacagcttttactgtgattttcctcggttcatcaaactcgcatgtacagacacatacagactggagttcctggtcactgccaacagtggtttcatctccatggccaccttcttcatcctgattgtgtcttacatcttcatcctggtcacagttcgtaaacactcctcaggtgcttcctccaaggccctctccactctctcagctcacatcactgtggtcgttttcttctttggtccttgcattattgtctatgtgtggcctttcccgactttacccatagataaatttttagcaattttcgatgccattatcactccttctatgaatcctgtcatctatacactgagaaataaggaaatgaaggttgcaatgaggagactctttgctagggctttaagtttcattgacagcttaagagattcaaattga

SEQ ID NO: 694 - DNA, 963 bp, Mus musculus
  MOR245-5
atgatgattctgatgtcggaagcaatgtatggaatgaactgctctgtagtatcagagtttgtgttcctcgggatcactaatatatgggaggttcagtttttactttttttcttcaccttgctgttctactttgcaagtatgattggcaaccttgtcattgtgctcactgtaaccttggatcctcatctgaattcccccttgtatttcctcttagctaatctctcagtcattgatatgatattctgctcgattacagctcctaagatgatctgtgacattttcaagaaacacaaaaccatctccttctggggatgtataactcagatcttcttcagtcatgcagttgggggcactgagatggtgctgctcatagccatggcttttgacagatatgtagccatatgcaagcctctgcattacctgatcatcatgagcccacgagtgtgtctgttctttttaatcacttcctgggtcattggtcttattcattcagtggtacaattagtgtttgttgtagacttgcctttctgtggtccaaatacactggacagtttttactgtgacctgccccgactcctcagacttgcctgcacaaacactcaagagcttgagctcatggtcactgtcaacagtgggctcatttctgtgggctcctttcttctactggtcatttcctatattttcattctattcactgtttggaaacattcttcttgtggattatctaaggccctttccactctttcagcacacatcactgtggtcatcttgttctttgggccactaatgtttttctatacgtggccttcacctacatcacaccttgataaatatcttgctatcttcgatgcatttatcactccttttttgaatccagtcatctatacattcaggaacaaagacatgaaagtggcaatggggagactatggggctatcttaggcattacaggaaaatgtcataa

SEQ ID NO: 695 - DNA, 933 bp, Mus musculus
  MOR119-2
atgggaaacgggacaactgtccaggaatttaccctggagggatttcctgctgtccagcacctgggcagacttctcttctcactgaacctgctggcatacctggcctccatcaccggaaatgtcgtcattgtctccatcatctgcaccagtacccgtctgaaaagccccatgtactttttcctcggtgttttctcctttggggagtcttgttttacaagtgctgttattcccaagttgttggctatatttcttttagggaaacaaacaatttcctttgttgcctgtttcatacaaacctttgtcactctatttatcggggcattcggtttttttctcatagctgtgatgtcagtggacaggtgtgtagctatttgcaagcctctgcattatcccaccatcatggacctgaggacctgcatccttctaattatggcctgccttgctctgaccttcaccctgatcacgtggctagtagtgacggtatcacggttatccttctgtggcccccacgtcatcccccacttcttctgtgacatcagccctctgatccacctctcttgctctgacaccagttctgctgaagctctcacgttcgcccttgctttgattattcttttctcgtctctcatcataaccactatcgcatacagcaacatagtcatcacaattgtgcgtctcccatcggctaaggagagacagagagctttttccacctgctcatcccacctcatcgtcctctctctgatgtatggcagctgtgtgtttatatatgtgaaaccgaagcaaatgagcaggcttgaatccaaccgagaggctgctcttgtgaacacggtagtgacgccgcttctgaaccccgtcatctacaccctgcgtaacaagcaggtccatcaggctctgagggagactctgagcagaataaaaatatcaggatag

SEQ ID NO: 696 - DNA, 933 bp, Mus musculus
  MOR257-3
atgggccaggaatttatcaaccagacttgggtgaatgaattcatcctcttgggactttccagtgacaggaacactcaggtctttctctttgtcctggtccttgccatgtatgtcgtaactgttgtggggaatactctgattcttttcctcatcagactggacatcaggcttcataccccgatgtacttcttcctcagtgttctgtccatagtggatctttgctatgggaatagtattgccccacaaatgctggctcacttggtttcagcccaaaagctcatccctttccacagctgtgtgttccagctctatatctccttagccttgggtggttctgagttcttccttttgggagcaatgtcctacgaccgctatgtggcagtatgccatccattgcactatactgtcatcatggatggaggagtgtgcctggggctggctgccagttgcttgatggctggtttctttaattcactgatggagacagtaatcaccttccgtcttcctctgtgtcacaatgtcatcaatcactttgcctgtgagacccttgcagtgcttcggctagcctgtgtagacatctctttcaacaaggtcatggtggccatctctgggtttctagtaatcatgcttccttgttgcctggttctattctcttatactcggatagtcattgccattctgcgcattcgatctactcagggacgtcacaaggcctttggaacttgtgcctctcacctcactgtggtttgtatgtgctttggggccacaatcttcacttacctaggaccacgttctgcctcatctgaggataaagagaagatggttgctctgttctatgctgtggtggcacccacgttgaaccctgtgatctacagcttgaggaataaagaagttatggctgctcttacaaaacttgttgaaaaattaaggtaa

SEQ ID NO: 697 - DNA, 942 bp, Mus musculus
  MOR257-4
atgaagagagacaatgcaacctgggtaagtgagtttatcctcatgggtctctccagtgacaaacacatccaagctggactctttgtcctctttggggtaacctacctgctgactctgctgggcaatgggctcattgtcctactgattgcactcgacccacgactccacctgcccatgtatttcttcctctgtcacctgtcagtggtggacatctgctacacctccagtggggttccccagatgctggcacacttcctcatggagaaaaagaccatctcttttgccctatgtggaacccagcactttttcgctctagccctaggaggaactgagtttctgttgctggctgccatggcctatgaccgctacgtggctgtctgtaatccattacggtacacagtggtaatgaacccaaggctctgcatgggtctagcaggtgtctcttggtttgtgggtgtagttaattctgctgtggagacagcagtcaccatgcgccttcccacctgtgggcacaatgtgctcaaccatgtggcatgtgagacactggcactggtcagactggcctgtgtggacatcaccctcaaccaagtggtgatactggcttctagtgtggtggtgctgctggtaccctgctgcctggtctctctgtcttatgcctacattgtgactgctatcttgaaaatccgctctacccagggacgccgcaaagcctttggtacttgtgcctcccacctgactgtggtctccatgtcttatggaatggccctcttcacacacatggagcccacctccacagcctctgctgagcaggacaaggtggtggtggtcttctatgctgtagtcacccccatgctgaatcctctcgtctacagtctgaggaacaaggatgtgaaggctgctttcagtcgagttctgatgaagatctttgagtcaaagaattag

SEQ ID NO: 698 - DNA, 939 bp, Mus musculus
  MOR135-14
atgataatgaacaacaaaactgtcatctcccagttcatcctcctgggcctgcccataccccaagagtaccagcacctgtactatgccctgttcctggccatgtacctcaccaccgtcctggggaacctcatcatcattatcctcataatactggactcccatctccacacacccatgtacttgtttctcagcaacttgtccttctctgatctctgcttttcctctgtcacaatgcccaagttgctacagaacatgcagagccaggacacgtccatctcctatgctggctgtctgacacaaatgtactttttattggtttttggagacctggagagcatccttcttttggtcatggcttatgaccggtatgtggctgtctgcttcccccttcattacatgagcatcatgagccccacactctgtgtgtgtctgctagtgttatcctgggtatttactgtgctgtattctatgttgcacactctactcttgtctagattgtcattctgtgaggataacttgatccaccactttttctgtgacatatctgccctgctcaagttggcttgctctgacattcatattaatgaattaatgatatttatcatgggagggcttgttagcatcatcccattcttactcattgttgtgtcctatatacaaattgtctactccattctaaagatttcatctgctcatgttttacacaagatcttctccacctgtgggtcccacctgtctgtagtctcactgttctatgggacaatttttgctctctacttatgtccatcagctaataactctactgtgaaggagatttccatggccatgatgtgcacagtggtgactcccatgctgaaccctttcatctacagcctgaggaatagagatatgagagatgccctttttggagtccttggcaagaagaaaatctctttatga

SEQ ID NO: 699 - DNA, 933 bp, Mus musculus
  MOR224-6
atgcggaatttctcagttgtgactcaatttatccttctgggcatccctcatacagagggtgtggagatcatgctctttgtcctgtttttgtctttctacatcttcaccttagtggggaacttgctcatactttttgcgattgtctcctccagtcggcttcacactcccatgtacttcttcctgtgccagctgtcagtgtgtgatatattttttccctccgttagctctcccaagatgctgttctacctctcaggaaatagcagagccatctcctatacaggctgtgtttgccagctcttcttctaccatttccttggctgtactgaatgtttcctatacacagtgatggcttatgaccgctttattgccatatgcttccctctaaggtactcaataatcatgaaccacaaagtgtgtgccatcatggctgtggggacatcattttttggctgcattcaggctacttttctgaccactctaaccttccagttgccctattgtggtcccaatgaagtggattattacttctgtgatatccctgtaatgctgaagctggcttgtgcagacacatcaaccctagagatggtgggtctcatcagtgtggggctgatgcccctcagctgcttcctcctcattctcacctcttacagcttcatcctttgctccattcttcagatccgctctactgagggccggcatagagccttctctacctgcagtgcccatctcactgccattctcctggccttcatgccagtagtcctcatatacctccagcctactcccaatccctggcttaatgcagcagttcaagtcttgaataacctggtgacacctatgctgaatcctttgatctatagcctaaggaataaggaagtaaaatgttctctaaagaaaatgctacagcaagggcctattctgtctaaaaagtga

SEQ ID NO: 700 - DNA, 927 bp, Mus musculus
  MOR171-22
atgggcactgggaatcattctgtaacagttgtgtttgtcttggtgggattaacacagcagcctgaactcctgctgcccctcttcattctgttcctgggcatctatgtggtgacagcagtggggaacctgggcatgatcctgctcatcacagtcagtccactgctgcatactcctatgtactatttcctcagcagcttatcctgtgttgatctctgctattccactgtcattacacccaaaatgctggtgaactttcttgggaagaaaaatttgattgtctactcagagtgcatggcccagctctttttctttgtgatcttcgtggtggctgagggctacctgctgactgccatggcatatgatcgctatgtggccatctgtagaccattgctgtataatgtgatcatgtcctccagactttgctcactgctagtgttggttgctttcatcttaggctttgtttctgccttagcacacacaagtgctatgatgaatctgagcttctgtaaatcccacgtcataagccattatttctgtgatgttcttcccctcctaaacctctcctgctctgacataaagctgaatgagcttcttctattcatcattgcaggcttcaacaccttggtgcccactctagctgttgccatctcttatgtctttattttctgcagcatccttcacatcaagtcatcaaagggcaggtccaaagcctttggaacctgcagctctcatctcatggctgtggggatcttctttgggtctatcaccttcatgtatttcaagcctccttcaagtaactctctggagcaagagaaggtgtcttctgtgttctataccacagtgatccccatgctgaacccattaatatacagtttgaggaacaaagatgtgaagaaagcattgggcaaatgtctggcagggagataa

SEQ ID NO: 701 - DNA, 948 bp, Mus musculus
  MOR171-23
atgcaggtgcaaatggcagatacaaatcactccacagtgactgagttcatccttgctggattaacagacaaaccagagctgcagctgcccctcttcctcctctttcttggaatctacctgctcacagtgctggggaacctgggcatgatcatcctgatcctgctcagctcccacctgcacacccccatgtactttttcctcagcagcctgtccttcattgacctctgttactccactgttattaccccgaagatgttggtgaactttgtggcaaagaagaatgtcatctcctatgaggaatgtatgactcagctctatttcttccttgcttttgttatatctgagtgtcacatgttggctgcaatggcatatgaccgctatgttgccatttgcaatcccttgctttacaatgtcactatgtcttaccaaatctgttcctggatggtaggtggggtatatggcatgggtttaattggtgcagcagttcatactctctgcatgctaagagtggttttctgtaaggctaatataataaaccattacttctgtgatcttttcccattgatggagcttgcctgctccagtacttatgtcaatgaggtagtactcctgtgtctcagtgctttcaatatctttattccaacattgactatcttgggttcttacatcttcatcatcattagtatcctccgtatcaaatccacggaaggcagattcaaagccttcagcacatgtagctcccacttctctgccgtttctgtcttctttggttccctggcattcatgtatctgcagcccttctctgtcagctccaaagacaaaggcaaagtgtcctctgtgttttacactactattgtgcccatgctgaaccccatgatctatagcctgaggaatagggatgttaaacttgctctaaataagttatttcaaaagaaattccatgtgtaa

SEQ ID NO: 702 - DNA, 936 bp, Mus musculus
  MOR171-24
atggcaacaggaaactattgcatgttacctgagttcattctgactgggctctcaaagaagccacaactccagatgcctctcttcctcctcttcctaggaatctatgtggtcactgtagtggggaatttgggcatgattacactgattaagctcagttctcacctgcatacccccatgtactatttcctcagtagtttgtcctttattgatctctgccattccactgtcattacccccaaaatgttggtgaactttgtgatagagaaaaacatcatttcctacactggatgcatggctcagctctatttctttctaatttttgctattgcagagtgtcatatgttagctgcaatggcatatgatcgctatgttgccatctgtaaccccttgctttacaatgtaaccatgtcctatcagatttacacttccctgatctttggagtctatattattggtgtggtttgtgcatcagctcacacaggcttcatgatcagaatacagttttgtaacttagaggtgatcaaccactatttctgtgatcttcttcccctgctggagcttgctcactctagtacttatgttaatgaattgttagttttatgttttggtacatttaacattgttgttccaaccatgactattcttacttcttacatcttcatcattgccaacatcttacgcattcgttctactggaggcaggtccaaagccttcagtacctgcagctcccacatcttagctgttgctgtgttctttgggtctgctgcattcatgtaccttcaaccatcatcagtcagctccatggaccaagggaaagtgtcctctgtgttttataccattgttgttcccatgctgaaccccttgatctatagtctgaggaataaggatgtcagtgttgccctgaagaaaatactagaaagaaaattattcatgtaa

SEQ ID NO: 703 - DNA, 948 bp, Mus musculus
  MOR171-25
atggaagaaatcaatgatacctcagtggctgagttcatcctcactgggttaacagagaacccagagctccaattgcctctatttcttatcttcctagctgtatatttggttacagttgttggaaaccttggcatgattgtattgattctgattagttctcagctacatacacccatgtattatttactcaggagcctgtcttttattgactgttgtcaatccactgtcattattcccaaaatgctgttgaactttgtgacagagatgaatatcatctcatacccacaatgcatagctcagttctacttcttctgtgcttttgctgtttcagaatgtcacatgttggctgcaatggcatatgaccgctatgtggctatatctaatcctttgctttataatgtaaccatgtcctatcaagtctgttcgttgatggtagctgtggtgtatggtattggcttaatcagtgccacagctcacacagtcttcctactaagagtgcttttttgtaagtctgatataataaaccactacttctgtgatcttttcccattactggagctctcgtgctctagtacttatattaatgaagttctagcactctccttcagtgcatttaatattattgtaccagctctgaccatccttagctcttacatcttcatcattgtcagtgttctccacattcaatccactggaggcagagtcaaggcctttcgcacctgcagctcccacatcatggctgttgcaatattttttggttctacagtattcatgtatctacagccatcttcagtcagctccatggaccaagggaaagtatcatcagtgttttataccattgttgtgcctatgttgaatcctctgatctacagcctgagaaataaagatgtcagagtttcccttaaaaagttactacaaaagataagttttctcaaaacaaaaaattag

SEQ ID NO: 704 - DNA, 945 bp, Mus musculus
  MOR1725-4
atggaagaaaagaatcagactgtcatgcctgagtttctcttccttggtattacagataacttccatcagaagattgtcatcttcatcatctttttctttgtttatcttgtcactcttgggggtaatgtggggatgatcgctctcatatggttggaccccaggctgcacacacctatgtacttttttctcagccaactgtcttttgtagatgtgtcttcctcttcttccatagctcccaagatgctgtgtgacatttttgcaaggaacaaagccatctcttttgtgggctgtgcagcacagatgtggttctttggtctctttgtggcaactgaatgctttctcctggctgccatggcatatgatcggtatgcagccatatgtaagcccttgctgtacacacttattatgtctccacatctctctgtgttattggttattgggccttatgccattgctcttataagtacaacaacacacacaactttgaccttttgcttaccattctgtggtccatatattatcaaccactttttctgtgacatttccccattgctgtctctagcatgttctgacacccacataaataagttggtgctttttgtcttggctggcacagtaggtgtgctcagtggactgataatcctggtgtcctatgtttgcatcttgaaggcaattttgaagattcagacagccaatgggagacaaaaagccttctcaacttgttcctctcacttggcaactgtctctatcctgtatgggactcttttcttcatctatgttagacccaatgtcagttcctccttgaatattaataaagtgatctctttattttacacgatggtgattcccatgttgaatcccctcatctacagcttgaggaaccaagaggtaaaaaatgcattcaggagaactttggagaagaagcacttcctaactggtgcttaa

SEQ ID NO: 705 - DNA, 945 bp, Mus musculus
  MOR175-5
atggaagaaaagaatcagactattgtaatggagtttttcttcctgggcctaacagatcatctctatcagaagattgcacttttcatcacgatcctctttgtttatcttgtcacactgggaggcaacttgggcatgatcactctcatatgggcagaccccaggctgcatacacctatgtacttttttctcagccacttgtcatttgttgatatgtgctcctcttcttccatagctcctaagatgctctgtgatatctttgcagaggagaaaaggatctctttcatgggctgtgcagcacagatgtggttctttggtttctttgtgggaactgagtgtttcctgcttgcttccatggcatatgatcggtacacagccatttgcaagcccttactgtatactctccttatgtctcagagggtatgtgtgcatctggttgtagggccatatgtctttgctattataaacatcacaactcatacaaccttggctttttgcttaccgttctgtggttcaaataccatcaaccatttcttctgtgatgtctctccacttttatcattggcgtgtgctgactcttgggttaataaggttgtgctttttgttctttctggagccataggagtgttcagtggtctgatcatcatagtctcctatgtcagcatcttgatgacaattttcaagattcaaactgctgatgggaaacaaaaagccttctctacttgttcctctcacttggcagctgtctccattctgtatgggacacttttctttatttatgttcgacccagtgcaagtttttccttaaacatcaacaaaatgatttctctgttttatactgtggtgatccctatgctgaatcccctcatctatagcctgaggaacaaagaagtgaaaggtgcattcaggagaaaggtgcaaaagaaacattttccagcaggcaggtga

SEQ ID NO: 706 - DNA, 945 bp, Mus musculus
  MOR203-2
atgatacaatacaatgagactgaagtcaagggcttctatctcctgggatttggagtccaacatgatattcagtgtttcctcttcattgtgtttcttatcatttacatgacatccatggtgggtaacactgggatgattcttctaatccacactgactccagacttcagacccccatgtacttcttcctacaacatctggcctttgttgatatctgttatacatctgctattactcccaagatgctacaaacctttgtagtagaagacagatacatatcatttggaggatgtgtagtgcaattactgatctacgcaatctttgctacttgtgactgttatctcctggcagctatggcagtggaccgctatgtagccatctgcaaaccacttcgttatcccatactcatgtcccgaaaagtctgcatccagatggtagctggctcctatctcattggatcaataaattcttcagtacacacaggctttacattttcattgtcatactgtaaatctaatcacatcaatcactttttctgtgatgtgcccccaattattagcctttcctgctccaacattgagaccaatatcaagattcttgttatctttgttggatttaacctgatattcactgtgctggttgttatcttctcctacatgtacatcatggctgccatcttaaagatgtcctctactgcagggaggaagaaaaccttctccacgtgtgcctcccacctgacagcagtcaccatcttctatggaacccttgcttacatgtacttacagcctcattcggacaattccgaggagaatatgaaagtggcctctgtgttttatggcattgtgattcccatgctgaatcctctgatctacagcctgagaaacaaggaggtcaaagatgctataaaattgacaaagaaaaagttatttagatttgacacacaataa

SEQ ID NO: 707 - DNA, 948 bp, Mus musculus
  MOR203-3
atgatacaaagaaataccactgaagtcactgacttctatcttctgggatttggagtccagaaaaatactcagagtatcctcttcgttgtatttcttgtggtctatgtaacatccatggtgggcaacactgggatgatcctcctcattaacactaactccagacttcagactcctatgtacttcttcttacaaaacctggcttttgttgatatctgttacacatctgccatcactcccaagatgctacagaacttcatggtagaagacagttccatatcatatacaggatgtgtaatacaattgttggtctatgccacatttgcgaccagtgactgttacctcctcgctgttatggcagtggaccggtatgtggcaatctgtaagccccttcgctaccccataatcatgtctcgacaagtttgtgttcagttggtagctttttcttatctcatgggatcaataaattcctctgtacacacaggatttacattctcattgtcttattgtaattccaaaaatatcaatcactttttctgtgatgttgtcccaatcatcagcctttcatgctccaacattgatattaatatcatgcttcttgttatttttgttggatttaacctgacgttcactgtgttggtcattatcttctcctacatatacatcatggccgccatcctaaagatgtcctctactgcagggaggaagaaaaccttctccacgtgtgcctcccacctgacagcagtcaccatcttctatggaacccttgcttacatgtacttacagcctcattcggacaattccgaggagaatatgaaagtggcctctgtgttttatggcattgtgattcccatgctgaatcctctgatctacagcctgagaaacaaggaggtcaaagaaggttttaaagcaatgagcagaaggttcttaagattgaaatcaaatccttga

SEQ ID NO: 708 - DNA, 945 bp, Mus musculus
  MOR203-4
atgacacaaggcaatggcactgaagtcactgacttctatcttctgggatttggagttgagagagatattcagtgtgtcctcttcattgtgttccttgttatttatgtgacatccatggtgggcaacactgggatgatcctccttatcaacactgactccagacttcagactcccatgtacttcttcctacaacatctggcttttgttgatatctgctacacatctgccatcactcccaagatgctgcagaatttcatggtcgaagataaatcaataacttttaagggatgtgtaatacaattatttatttatgctgtatttgcaaccagtgactgttatctcctcgctgttatggcagtggaccggtatgtggcaatctgtaagccccttcgctaccccataatcatgtctcggcaagtctgtgttcagttggtagctgtttcttatctcatgggatcaataaattcctctgtacacacaggatttacattttcactgtccttctgtgcatcaaaaatcaatcactttttctgtgacattccgccaattgtcactctttcatgctacaacaatgacattaatttcatgctaattttgatttttgttggatttaacctaacattcactgtgtcagttgttatcttatcatacatatacatcatggccgccatcctaaagatgtcctctactgcagggaggaagaaaaccttctccacgtgtgcctcccacctgacagcagtcaccatcttctatggaacccttgcttacatgtacttacagcctccttcagacaattccgaggagaatatgaaagtggcctctgtgttttatggcattgtgattcccatgctaaatcctctgatctacagcctgagaaacaaggaagtcaaagatgctattaaagctacagggaaaaagttccttaaattggatttaaattactaa

SEQ ID NO: 709 - DNA, 942 bp, Mus musculus
  MOR223-5
atggaaagaatcaactacacagtcttgactgagttcatcctcacaggggtcccccaccctcccaggctgaggacattcctgtttgtgttctttttgctgatctacatcctgactcagctggggaacgcgctcatcctgatcaccgtctgcgccgacacgcagctccatgcgcgccccatgtatatcttccttggtgctctctccgtcatcgacatgggcatctctaccatcatcgtcccccgcctcatgatgaacttcactccaggcattaagcccatcccatttgggggatgtgtggctcagctttatttctaccactttctgggaagttcccagtgtttcctatacaccactatggcctatgacaggtacctggccatatgccaacccctgcgttacccagtcctcatgtctgctaagttgagtatcttgctggtggctggagcttgggtggctggctcaatccacggagcaatccaagccatcctaaccttccgcttgccctactgtggtcccaatcaggtagattacttcttctgtgacattcctgcagtgctgaagctagcctgtgcagataccacagtcaatgagttggtgacctttgtggacattggagtggtggtcgccagttgtttctctctgatccttctttcctacatctatatcattcgggccatcctgagaatccgcacagctgatgggaggcgaagggccttctcaacatgtggagctcatgtgactattgttactgtgtactatgtgccctgtgccttcatctaccttcgacctgacagccacagcatcctggatggggcggctgctctcttccccacagccatcacacctttcctcaatcccctcatctacaccctgaggaaccaggaggtgaagttagccttgaggagaatggtaggaagtcaaagcactaagagtgaggtctga

SEQ ID NO: 710 - DNA, 957 bp, Mus musculus
  MOR223-6
atgagaagaaccagaaacacatcgctggatgctgtggtgacagatttccttctcctgggcttggctcaccccccaaatctaagagccttcctcttcctggtcttcttcctcatttacatcctgacacagctggggaacctgctcatcctgctcactgtgtgggctgaccccaagctgcatgcccgccccatgtacattcttctgggtgtgctctccttcctggacatgtggctctcctcagtcattgttcctcgacttattttaaacttcactcctgccagcaaggctatcccatttggtggttgtgtagctcaactatattttttccacttcctaggcagcacccagtgcttcctctacactttgatggcctatgacaggtacctggcaatatgccagccacttcgctaccctgtgctcatgaatgggaagttgtgcacaattctagtgtctggagcttgggtggctggctccatccatgggtctattcaaaccactctgaccttcagattgccctactgtgggcccaaccaaatagattattttatctgtgacattcctgcagtgctgagactggcctgtgccgatacgactgtcaatgaactggtgacctttgtggatattggggtagtggctgccagttgcttcatgctgattctgctctcctatgccaacatagttcatgccatcctgaagatacgcactgccgatggcaggaagcgtgccttctccacctgtggctcccatctcactgtggtcaccgtctactatgtcccctgtattttcatctaccttcgggcaggttccaagagtccctttgacggagcagttgctgtattttacactgttgtcactccattactgaatcccctcatctacaccctgaggaaccaggaagtgaagtctgccctgaagaggctaacagcaggtagaagggatgtgggtggagagaagtag

SEQ ID NO: 711 - DNA, 936 bp, Mus musculus
  MOR106-6
atgaaaaccctcagcagccccagcaactccagcaccatcactggcttcatcctcttgggcttcccctgccccagggaggggcaaatcctcctctttgtgaccttcttcattgtttacatactcattcttatgggcaatgcttccatcatctgtgctgtgtactgtgatcagagactccacacccccatgtacttcctgctggccaacttctccttcctggagatctggtatgtcacctccacagtccccaacatgttggccaacttcctttcagacaccaaggtcatctctttctctggatgcttcctgcagttctatttcttcttctcctttggttctacagaatgctttttcctggcagtcatggcatttgatcgataccttgccatctgtaggccactacattatccttctctcatgactgggcacctctgcaacattcttgtgatcagttgctgggtgcttggtttcctctggttccctgtacccatcatcatcatctcccagatgtccttctgtgggtccagaattatagaccacttcctgtgtgacccaggccctcttttggcccttgcctgttccagagccccattgatggaggttttctggacaattataatgtctatgctcctggttattcctttcctcttcatcatgggaacttacatattggtcctaagagctgtgtttagacttccttcaagagatggacaaaaaaaggccttctccacttgcgggtctcatctcacagtagtttcactcttttattgctcagtgatgaaaatgtatttgagcccaacatctgagcatgaagctggaatgcagaagcttgtaactctattttattctgtgggtactccactacttaatcctgtgatatacagtctgaggaacaaagatatgaaaaatgccctgcagaagattttaagaacataa

SEQ ID NO: 712 - DNA, 960 bp, Mus musculus
  MOR256-30
atgcaggtgaccacagaaaggcagaatgtgagtttccccgacacatttgttctggtgggcttctctgatcacccatggctggagatgcccctctttggagtgcttctgatctcctacatcttcaccatgataggaaacagctctatcatcgtcctctctttggtggagcctaggctccaaacacccatgtacttcttcttagacaacctgtctctgctggacctctgtgtcacgtgcaccattgtcccacagttgctagtcaatctctggggcccagaaaagacaattgcctcctggagctgcattgcgcaggcctacctcttccactggaccagctgcaccgaaagcgctctgctggcagtaatggcttttgatcgctatgtggccatctgctgtcccctccgatatgtgctcatcatgcatctctgggcatgcgtgtggctggcagctgtatgctgggccagtggcctggccaattctctggttcaagctacactcaccctctaccttaccctttgtgcgaaaaacacactggaccacttcttctgtgaggtgcctgctttgattaaactggcatgtagtgacaccaccacaaacgacctgtccctagccttgggagctattccttttggaatagtgtctcctttgacagtgctcatctcttacatcttcattgctagggctgtgctgaagttaccctcagctgagggaaggcgcaaggctttgagcacatgcacttctcacttgctcgtggtcaccatgtactttggacctggtatgtacacgtacctccagccaccaggcaacaacactcagtccgagttcctgtccctcttctactgtgtcttcaccccgctcctcaacccactcatctacactctgagaaacaaggatgtgaaggaagcttggaagaaggtcctaacatcccagagtaaggggatatctttgaaaggccagtga

SEQ ID NO: 713 - DNA, 936 bp, Mus musculus
  MOR205-1
atggaaaggactaacgtgagccacgagatggagtttgaactcttgggcctcaccagtgacccccagctccagaagctgctctttgtggtgttcctggtcatgtacgccatcactgtgctggggaacctggtcatgttctttctcatccatgtgagtaccaccctgcacacacctatgtactctctcctcaagagcctttcgctcctggatttctgctactcttctacggtggttcctcagacgctgataaacttcttggttgagagaaaagtaatctcttactttggctgcatggctcagatgttcttttttgctggcttcgccaccagcgagtgctatctcattgctgcaatggcctatgaccgctatgttgctgtctgcagtcctctcctctatccgaccatagtgtctcctaatgtctgtgcctctctgattgggggctcctatggagcagggtttctcaattctcttatccatacaagctgcatcttcagtctgaacttctgtggtgctcacgtggtcactcatttcttctgcgatggaccgcccattctctccctgtcctgcgtggacacttccctgtgtgagatcttgctcttcatttttgccggcttcaaccttttgagctgtactctcaccatcttgatctcctacttattaattttcattgctatcctacaaatacgttcaaaccagggcaggtttaaggcgttctccacctgctcttcccacctcactgctgtgtgcttcttttttggcacaacactttttatgtacctgcgccctaagtccagctactccttgacccaggaccgcacagttgccgtgatctacacagcggtgatcccaatgctgaaccccttaatctactctttgagaaacaaggatgtgaaggaggctctaaggaaggtttggggctggaaatcaatgggatga

SEQ ID NO: 714 - DNA, 948 bp, Mus musculus
  MOR218-3
atgactgacacaataaccaacacaacagaatacatggaattcttgctcatgggatatccagatgaacaggtgctgcagacattgtgtgccacacttttcttcttgatttacctgggagcactagtgggaaacttcctcattatcaccattactactatagaccagcatctccagtcccctatgtatttctttctgaagaatttgtccctgattgatatctgttatatttctgtcactgttcccaaatccatcatgaactctgtgactaacacccattccatctccttcctgggatgtgttttacaagttttctgtgtaatatttttggcaggcactgaatttgccctgcttttggtgatgtcctatgaccgctatgctgccatttgctttcctctacattatgaggccgtaatgaataaagacgcctgtgttcagatggtggcagcagcatggctcagtggatgtatctatgggtctgttcatgccacaggaacattctctgtccatttctgtggtccaaatgtagtgtatcaattcttttgtgatatcccatcacttcttagacttgcttgttttggagaccaaattctagaatatgtgtttattattactagctgttgtttcgccttcatgtgttttatattgatggttatttcctatgttcacattttcactataatcctaagaattccttctatacaaggaaggtttaaaattttctctacctgtataccccatcttactgtggtgaccttatttctctcttctggatttgttgcatatttaggctcagcagtaaaatccccatcatcactgaatctctttatgtcagtgttttactctctgttacctcccagcctgaatcctgtgatttatagctttagaaattcagatgtaaaagtggccctacataacatttttggtgaaaaaatgaccacacacttctaa

SEQ ID NO: 715 - DNA, 945 bp, Mus musculus
  MOR204-21
atggctttcctggaggatgcgaaccacactgcagtgacagagttcattttattgggtttaacagatgacccagtccttaaagttgtcctcttcagcatcatcctgtgcatctacctggtgactgtgtctgggaacctcagcaccatccttctcatcagagtctcttcccagctccatcaccccatgtacttttttctcagccacttggcttctgttgacgtaggctactcatctactgtcacacccaaaatgcttgccaacttcctggtggagagaagcacaatctcctaccttgggtgtaccatccagcttttctcaggtgctttttttgggacacttgagtgcttccttctggccaccatggcttatgatcgttttatagcaatctgcaacccattgctttattccaccaaaatgtccacacaagtctgtatccagttgcttgtaggatcttatattggtgggtttcttaatgcttcctcctttctcctttccttctttcctcttctcttctgtggaccaaatagagtcaatcactttttctgtgatttggctcctttgatagagctctcctgttcaggtagcaatgtccccatagttcctgcctcattttgttctgcctttgtcattatagtcacagtatttgttatagccatctcctacacctacatcctcatcaccatcctgaagatgcgctccactgagggccgacagaaggccttctccacctgcacttcccacctcactgcagtcactctgttctatgggaccataacattcatttatgtgatgcccaaatcaagcttctccactgaccagaacaaggtggtgtctgtgttctacatggttgtgatccccatgttgaaccccctcatctacagcctcagaaacaatgagattaagggtgctctgaagagacagcttgctaggaaaatattctcttaa

SEQ ID NO: 716 - DNA, 945 bp, Mus musculus
  MOR204-22
atggctttcctggaggatgggaaccacactgcagtgacagagttcgttttatttggattaacagatgatccagttcttagagtcatcctcttcatcatcttcctgtgcatctacctggtgaatgtgtctgggaacctcagcaccatccttctcatcagagtctcttcccagctccatcaccccatgtacttttttctcagccacttggcttctgttgacgtaggctactcatctactgtcacacccaaaatgcttgccaacttcctgctggagagaagcacaatctcctaccttgggtgtaccatccagcttttctcaggtgcttttgttgggacacttgagtgcttccttctggccaccatggcttatgatcgttttatagcaatctgcaacccattgctttattccaccaaaatgtccacacaagtctgtatccagttgcttgtaggatcttatattggtgggtttcttaatgcttcctcctttctcctttccttctttcctcttctcttctgtggaccaaatagagtcaatcactattcctgtgatttgactcctttgatagagctctcctgttcaggtagcaatgtccccatagttcctgcctcattttgctctgcctttgtcattatagtcacagtgtctgtcatagccatctcctacacctacatcctcatcaccatcctgaagatgcgctccactgagggccgacagaaggccttctccacctgcacttcccacctcactgcagtgactctctattatggaactgtcacattcatttatgtgatgcccaaatccagctactccacggaccagaacaaggtggtgtctgtgttctacacagtggtaatcccaatgttgaaccccatcatctacagcctcaggaacaatgagattaagggtgctctgaagagacagcttgctaggaaaatattctcttaa

SEQ ID NO: 717 - DNA, 945 bp, Mus musculus
  MOR162-4
atgatgttgggaagaatggccttcagcaatgactcttctgtgaaggagtttatcctgctgggcttaacacagcagccagagctccagatgcctctcttcttcctcttcttgggaatctatgtggtctccatggtggggaacctgggactgattgttctgattgtgttgaatcctcacctgcacacccccatgtactactttctcttcaacctttcctttattgatctctgctactcttctgtcataacccccagaatgttggtgggttttgtgaagcagaacatcatctctcatgcagagtgtatgactcagctctttttcttctgcttctttgttattgatgaatgctacattttgacagcaatggcctatgacagatatgctgccatctgtaagcccctgctttaccaggttaccatgtctcatcaggtctgccacttgatgatggtgggagtgtatgtgatggggcttgtgggtgccatggcacatactggtagcatgctaagtctgaccttctgtgatggcaacattatcaatcactacatgtgtgacatacctcctctccagaagctctcctgcacaagcacctccatcaatgagctggtagttttcattgttgtgggtgtcaatgtaataatacccagtctgactgtttttatttcttacacgttgatcctttctaacatcctcagcattcaatctgcagagggtaggtcgaaagccttcagtacgtgtggctcccatgtgattgctgtttctcttttctttggagcttcagcattcatgtaccttaagccttctagtgcatctgtggatgatgataaaatatctaccatattttataccattgtgggcccaatgttgaatcctttcatttacagtttaaggaataaggatgtccacattgcactgagaaaaactttgaagaaaagtatgtttatctaa

SEQ ID NO: 718 - DNA, 930 bp, Mus musculus
  MOR162-5
atgggttttggaaatgactcttcggtgaaagaatttattctgttgggcttgacacagcaaccggagctccagctgcctctcttcttcctcttcttgggaatctatgtggtctccattgtggggaacctgggcttgattgttctgattgttttgaatcctcacctgcacacgcccatgtactactttctctttaacctttcctttgttgatttctgctactcctctgtcataacccccaaaatgttagtgagttttgtgacacagaacatcatctcccatgcagagtgcatgactcagctctttttctttgccttctttgttattgatgaatgctacattttgacagcaatggcctatgacagatatgctgccatttgtaagcccctgctttaccaggtcaccatgtctcatcaggtctgccacttcatgatgatgggtgtggttgtgatggggtctgtgggtgctgtggcacacatcatttgcatgctgagactcaccttctgtgatggcaacatcatcaatcactacatgtgtgacatacctccccttctgaagctctcgtgcacaagcacctacatcaatgagctggtggttttcattattgtgggttttaatgtaacagtgcccattctgactatctttatttcttataccttgatcctttccaatattcttagtatccattctgcagagggtaggtcaaaagccttcagtacatgtggctctcatgtaatagctgtttctattttctttggatctttagcattcatgtatcttaagccttctagtgcatctgtggatgatgacaaaatatctactatcttttataccattgtaggcccaatgttgaatcctttcatctacagtttaaggaataaggatgtccacattgcaatgcgaaaaactttgaaaaaaggtatgtttgcctaa

SEQ ID NO: 719 - DNA, 930 bp, Mus musculus
  MOR162-6
atggtattagaaaattcctcttcagttaaagaatttatcctgctgggcttgacacagcaaccagagctccaaatgcctctctttttcctgttcttgggaatctacattgtatccatggtggggaacctgggcttgactgttctgattgttttgaatcctcacctgcacaaccccatgtactactttctcttcaacctttccttcacagatctctgctactccactgtcataacccccagaatgctggtgggttttgtgaagcagaacaccatctctcatgctgagtgcatgactcaacactttttcttttgcttctttgttattgatgaatgctacattttgacagcagtggcctatgacagatatgctgccatctgtaagcctctactttaccaagttaccatgtctcatcaggtttgcctgctgatgacagttggggtgtatgtgatgggatttttggaagccattgcacacactggtagtatggtaagcctgaccttctgtgatggcaacattattaatcactatgcatgtgacatacttcctctcctcaaactctcctgcacaagcaccaccatcaatgagttggtggttttcattgttgtgggtgtcaatgtcatagttcccaccctgacaatctttatttcttacaccttgatcctttccaacatcctcagcatccattctgcagaaggtaggtcaaaagccttcagtacctgtggctcccatgtgattgctgtttcacttttctttggagctgcagccttcatgtatcttaagccttctagtgcatctgaggatgatgataaagtatctactatcttttataccattgtgggcccaatgctgaatcctttcatctacagtctaaggaataaggatgtctaccttgcacttagaaaaactttgatgaaaaggagttttacctaa

SEQ ID NO: 720 - DNA, 945 bp, Mus musculus
  MOR162-7
atgaattggggaagaatggctttaggaaatgactcttcagtgaaagaatttatcctgcttggcttgacacagcagccagagctccaactgcctctcttcttcttcttcttgggagtctatatattctccgtggtggggaacctgggcttgattgttctgattgtgttgaatcctcacctgcaaacccctatgtactactttctctttaacctttcctttacagatctctgctactcttctgtcataacccccaaaatgctggtgagttttgtgaagcagaatatcatttctcatgctgagtgcatgactcaactctttttcttctgcttctttgttattgatgaatgctacattttgacagcaatggcttatgacagatatgctgccatctgtaagcccctgctttaccaggtcaccatgtcccatcgggtctgcctcttgatgacagttggggtgtatgttatggggtttgtggaagctatggcgcatactgccagtatggtacacctgatcttctgtgatagcaacatcatcaatcactacatgtgtgaaataaatgctcttctaaagctctcctgcacaagcacttccatcaatgagctggtggtttacattgttgtaggttttaatgtaatagtgcccactctgactatctttattacttacacgttgatccttttcaacatcctcagcatccattctgcagaaggtaggtcaaaagccttcagcacctgtggctcccatatgatagctgtttctcttttctttggagctgcagcattcatgtatcttaagccttctagtgcatcagaggatgaagataaagtatctaccattttttataccattatgggcccaatgttgaatcctttcatctacagtataaggaataaggatgtccatatcgcccttaaaaaaactttgaagagaagcatttttatttaa

SEQ ID NO: 721 - DNA, 936 bp, Mus musculus
  MOR161-5
atggctgcagcgaacacctcctcagtggcagagttcatccttgttggattaacagaccagcctcaactccagatcccactcttcttcctgtttctaggtttctacattgtcaccatggtggggaacctgggcttgatcacactgatagggctgaactctcacctgcatatccccatgtactttttcctcttcaatttgtccttcatagatttcagttactccaccacactcacccctaaaatgctggtggggtttgttctgaggaagaacatcatctcctatgcagggtgtatgacacagtttttcttcttctgcttctttgtcttttctgagtcttacatcctgtcagcaatggcatatgaccgctatgttgccatctgtaaaccactgttgtatagtgtcaccatgtctccccaagtgtgttcataccttttgtcaggtgtctatgggatgggagtttttggggctgtggcccatatgggaaacctacagtttataagcttctgtgctgacaacatcattaaccactatatgtgtgacataattcccctccttgagctgtcctgcaatagctcatacatcaatttgttggtggtttttattgttgtgaccattggcattggagtgcccattgttaccatttttatatcttatggtttcatcctctctagcattctccacattagttctaaagaaggcaggtcgaaagcctttagtacatgtacgtcccatattattgtagtgtctctcttttttgggtcaggagcttttatgtacctcaaaccaccttctagtttgcctctggatcagggaaaagtatcctctgttttctacaccgctgtggtgcccatgttcaatccattaatctatagcctgaggaataaggatgtcaaaattgctctgaagaaaaccttgagcagaaaaaatttctcttaa

SEQ ID NO: 722 - DNA, 948 bp, Mus musculus
  MOR254-1
atggacgtctacaatcttaccacagtgactcagttcatcctcatagggctctctgacctccctgaagtgcgctatccactctttgtggcctttgtcatcatctatcagatcactttactgggaaatgggctcatcctcttggccattgtgactgagaaaaagcttcaaactcccatgtattacctgttggcaaatctgtccttactggacatattctgcccatcagctactgtccccaagatgcttaagaatctcttgactgaggatcacagcatttcctttgttgggtgtgctttacagctctatttcctggtggctctagctgggactgaagtcttcttgctggctgtgatggcttatgaccggtatgtggccatatgctttcctctacgttactctctcattatgaccaaggttcgctgtgtgcagctgttgtttgggacttgggcagctgggtttctgaactcctttgtccacacaatgtccacctttagcctttctttctgcaagtctaatagagttaaccagtattattgtgatattccacctgtggtggccctgtcatgctcatctacctatatggcagaaatgcttgttttagtgataggaggtatctgtggggttggtgcttttctgatcactctgatctcctacatatacattgtctccaccatcctaaagatccggtcagctgaaggaaagcgcaaagctttctccacatgtgcttcccatcttcttgtagtcttcttgttctatggcaccactatatttacctatattcgcccaacctccagtcaacactctcctggtagagacagactcatctctatgttgtatggggtcattactcccatgttaaaccccattatctacagtctgagaaacacagaagtcaaaggagctctaagaaaagttttacatcttcggatatgttcacagagagaatga

SEQ ID NO: 723 - DNA, 954 bp, Mus musculus
  MOR254-2
atggagatggacgtctacaatcttaccacagtgactcagttcatcctcatagggctctctgacctccctgaagtgcgctatccactctttgtggcctttgtcatcatctatcagatcactttactgggaaatgggctcatcctcttggccattgtgactgagaaaaagcttcaaactcccatgtattacctgttggcaaatctgtccttactggacatattctgcccatcagctactgttcccaagatgcttaagaatctcttgactgaggatcacagcatttcctttgttgggtgtgctttacagctctatttcctggtggccctagctgggactgaagtctttttgctggctgtgatggcttatgaccggtatgtggccatatgctttcctctacgttactctctcattatgaccaaggttcgctgtgtgcagctgttgtttgggacttgggcagctgggtttctgaactcttttgtccacacaatgtccacctttagcctttctttctgcaagtctaatagagttaaccagtattattgtgatattccacctgtggtggccctgtcatgctcatccacctatatggcagaagtgcttcttttagtgatagcaagtatctttggggttggtgcttttctgatcactttgatctcctacatatacattgtctccaccatcctaaagatccggtcagcagaaggaaagcgcaaagctttctccacatgtgcttcccatcttcttgtagtcttcttgttctatggtacaactatatttacctatatgcgcccaacctccagtcaacactctcctggaagagacagactcatctctatgttgtatggggtcattactcccatgttaaaccccattatctacagcctgagaaacacagaagtcaaaggagctctaagaaaagttttacatcttcggatatgttcacagacagcatga

SEQ ID NO: 724 - DNA, 939 bp, Mus musculus
  MOR214-5
atgattggggaaagaaatattaccacaataacccagttcatcctcctgggattttcagatttccctagaatcacagttctgctttttgtcatatttttgatgatctacattatgactatgacctggaacttgtcccttattgctttaataagaatggattcccaccttcacacacccatgtatttcttcctcagtaatctctcctttatagacctctgctttgttacttccacagcccccaagatgctttccaacttcttccaggaaaaccaaactatcagctttgtgggctgcatagttcaatactttatcctttccactatggggctgactgaatgttgcctcatgacagccatggcctatgacaggtatgctgccatttgtaaccctcttctgtactcatcagtcatgtcacccacactatgtgctcagatggtgatgggaagctacacagctggactcacaggctctgtatctcagatatgtgccttgctgcagctctatttctgtggccctaatgtcattaggcatttcttctgtgacatatctcagctattaaatctatcctgtagtgatgctttctttgtacaggtccttcttgctatattaaccatgtgttttggaatagcaaatgccttagccaccatgctgtcctatggtttcatcgtcctgtccatcttaaagatcacttcagctaaaggcaggtccaaggccttcaacacctgtgcttctcacctgacagctgtttctctcttctatagtactggcatctttgtctatttgcgatccagctctggtagctcctccagttttgacagattcacatctgtcttctacactgtggtgattcccatgttgaaccctttgatatatagtctgagaaacaaggaaatcaaagatgccatgaagcggttgcagaaaaagaaaatctgcaactaa

SEQ ID NO: 725 - DNA, 936 bp, Mus musculus
  MOR240-1
atggaaccagggaacctcacatgggtgtcagagtttatcttcctggggttctcagagatctgggagcttcaggtcttcctgtttgtggtgttcttgtgtgtctacagcacgaccgtggtgggaaacctcctcatcatagtcacggtctcctcagaccccaggctccacacacctatgtacttcctgctccgcaacctggctgtcttagacctctgcttctcctcagtcactgcccccaagatgctggtggacttcctctctgagaagaagactatctcctaccgaggctgcatggtacagatcttcttcttccacttcctgggaggggccatggtcttcttcctctcagtaatggcttatgaccgcctggtggctatttcccgacctctccactatgtcaccatcatgaacagccagctttgtatggggctggtggtggcttcctgggtaggaggctttgcccactcgattgtccagctgtctctgatgctcccgttgccgttctgtggccccaatgtcctggataacttctactgtgatgtcccccaagtactgagacttgcttgcatggacacctccctcttggagttcctcatgatctccaacagtgggatgctggatgtcatctggttctttctccttctcatctcctacttggtcatcctggtgatgctgaggtctcactcaggggaggcgaggaggaaggcggcatccacctgtaccacccacatcatcgtggtgtctatgatcttcattccaagcatttacctgtatgcccggcccttcacccccttcaccatggacaaggcagtgtccatcagccacacggtcttgacccccatgctcaaccccatgatctacacgctcaggaaccaggagatgcaggcagccatgaagagactagcaaagcgcttagcgctttgcaacagggagtga

SEQ ID NO: 726 - DNA, 942 bp, Mus musculus
  MOR240-2
atggaaacccagaacatcacatgggtgtcagagtttattctcttaggtttctcacagactcaagaactccagaaactcctgtttgtggtgtttctgtgtgtctacatcaccactgtggtgggaaatatccttatcatgattactgtgacttttgaccccaggctggacatgcctatgtattttctgcttcgaaacctggccgtcatagatctcagctattctacagtcacctcccccaagatgctggtggacttctttcacaagactaagaccatctcgtaccagggctgcatggcacagatcttcttcttccatctcctgggaggtgggacggtcttcttcctctccgtgatggcctatgaccgctacatagccatctcccggcccctgcactatgtcaccatcatgaacaccaagctgtgcgtggggctggtggtggcttcctgggtaggaggctttgcccactcgattgtccagctgtctctgatgcttccactgccgttctgtggccccaatgtcctggataacttctactgtgatgtcccccaagtactgagacttgcctgcacggacacctccctcttggagttcctcatgatctccaacagtgggatgctggttctcatctggttcctcctccttctcatctcttacactgtcattctggtgatgctgaggtcgcactcagggcaggcgaggaggaaggcggcgtccacctgcaccacccacattattgtggtgtctatgatcttcattccctgcatctatatctactccagacccttcaccccctttcccttggacaaggccgtgtccatcagctacacggtcttgacccccatgctcaaccccatgatctacactctcaggaaccaggagatgcaggcagccatgaagagactagcagaacacttggtacttactaaaagaaatgagctttaa

SEQ ID NO: 727 - DNA, 936 bp, Mus musculus
  MOR240-3
atgcaaccagggaacctcacatgggtgtcagagttcgtcttcctggggttctcagagatctgggagcttcaggtcttcctgtttgtggtgttcttgtgtgtctacagcacgaccgtggtgggaaacctcctcatcatagtcacggtctcctcagaccccaggctccacacacctatgtacttcctgctccgcaacctggctgtcttagacctctgcttctcctcagtcactgcccccaagatgctggtggacttcctctctgagaagaagaccatctcctaccaaggctgcatggcacaggtcttcttcttccacttcctgggaggggccatggtcttcttcctgtcagtgatggcctatgaccgcctggtggctatctcccggcccctgcactatgtcaccatcatgaacactcaacactgtgtagtactagtggtgactgcatgggttgtgggatttgtccactcgattgtccagctgtctctgatgctcccgttgccgttctgtggacccaatgtcctggataacttctactgtgatgtcccccaagtgctgagacttgcctgcacggacacctccctcttggagttcctcatgatctccaacagtgggatgctggatgtcatctggttctttctccttctcatctcctacttggtcatcctggtgatgctgaggtctcactcaggggaggcgaggaggaaggtggcgtccacctgcaccactcacatcatcgtggtgtctatgatcttcattccaagcatttacctgtatgcccggcccttcacccccttcaccatggacaaggccgtgtccatcagccacacggtcatgacccccatgctcaaccccatgatctacacgctcaggaaccaggagatgcaggcagcactgaagagactagggatgcatctgctagtttgtagaaaagagtga

SEQ ID NO: 728 - DNA, 930 bp, Mus musculus
  MOR266-4
atggaaataataaataaaactgccaaggtacaattcttctttcgtccattctcacctgaccctggggtgcagatggtgatttttgtgaccttcttggtgatgtacctgaccagcctcagtggaaatgccacaattgctgtgattgtccatattaaccactcactccacacccccatgtacttttttctagctaatttggcagttctggaaatcttctatacatcatccattgcaccactggccttggcaaaccttctttctatggggaaaactcctgtttccatcactggttgtggtacccagatgtttttctttgttttcttgggtggagctgactgtgtcctgcttgcagtcatggcttacgaccggtttgttgcgatctgctaccctctgagatacacactcatcatgagttggtccttgtgtgtagagatgatggtggggtccctggtgctgggattcctgctgtcactgcccctaactattttaatcttccatctgccattctgccacaacaatgaaatctatcacttctactgtgacatgcctgcagtcatacgcctggcttgtggagacacgcatgttcataggactgccctgtatatcatcagcttcattgtcctaagcatccccctaactctgatctctatctcctatgtcttcatcatcacagcgattttacggatccggtctgctgaagggcgccatcgagccttctctacctgctcctctcacatcgtagtggtcctcctacagtatggctgcaccagttttatatatttatcccccagttccagctactctcctgagatgggcagaatggtgtctgtggtctacacttttatcacccccattttaaaccctttgatctatagtatgaggaacaaggaactaaaagatgctctgaggaaggcattgagaaagttctag

SEQ ID NO: 729 - DNA, 942 bp, Mus musculus
  MOR192-1
atggataaacacaacctaacagttgtgactgaattcatcctgatgggaatcactgagaaccctgagctgcaggctccattgtttgggttgttcctagtcatctacctgacctcagtgattggcaatcttgggataatcatcctcaccaatgtagacgccaagctacagacgccaatgtatttctttctcaggcatttggcttttactgactttgtttattcaacaactgtgggaccaaaaatgttggtaaactttgttgtagatcaaaatgcaatttcctactctctttgtgctacacagctagctttttttcttctgttcattggcagtgacctttttattctgtctgcaatgtcctatgaccgctatgtggccatatgtaagcctctgctctacactgtcatcatgtcccataaagtatgttgggttctagtcacaatgacctatctttactgtacatttatgtcccttgtagtcaccataaatattttctctttatccttctgtggctacaatgtcatcaaccatttcttttgtgattgtattcccttaatatcgttgctttgctcaaatacacaagaagttgaacttatagttatgatctttgcagcttttgatttgatttcttcccttgtcgttgtgcttatgtcctacctgctcattctcatagctgttctcaggatgaactctgctgagggcagacgcaaagctttctctacctgtgggtcacacctgacagtagttacagtattctatgggacactgatatttatgtatgtacaacctgaatctagccattcaattgatactgataaaatatcatctatattttatactttaatcatccccttattgaatcccctgatctacagtctgaggaacaaagatgtaaaagaagctttacaaagaacatggcaaaaaatattcaacacattttcttaa

SEQ ID NO: 730 - DNA, 942 bp, Mus musculus
  MOR190-1
atggagaaccaaaaccgcacagtagtaactgaattcatcctgatgggcatcactgaccaccctgagctgcaatcctcattgtttggtttgtttcttctcatctatctgatatcactggtgggaaatttgggcatgattgtccttacaatggtggactccaggctgcaaacacccatgtatttctttcttagacacctcgctactactgaccttggttattcaacaactgtgggacccaaaatgttaacaaattttattgttgatcaaaatagaatatcctttaacctttgtgctacacagttagccttctttcttctgttcattgcttgtgaactttttattctgtctgcaatgtcttatgaccgctatgtggctatctgtaagcctctgttctatatggtcatcatgtcaaaaagactatgctgggtgcttgtagtaatcccttatgtctactgtacaattgtggctcttttaatcacaattaagattttcactttgtctttctgtggctccaatgtcatcagtcatttctactgtgacagtcttcctttgttatctttggtctgctcaaatacacaagaaattgaagtgataatgttgttcttatcagcttttaatttaatttcctctcttttgcttgttcttgtgtcctacctgctcatcctcatagctatactcaggatgaactctgctgagggcaggcgcaaggctttctccacctgtggatcccacctgactgtggacactgtcttctatgggacgttgatatttatgtacatgcagcccaaatccagtcattcctttgacactgataaattagcttctgttttttacaccctgattatccccatgttgaatcccttgatctacagcttgaggaataaagatgtaaaagatgctcttcataggacagggaaaaaactacacagtgtttgcttttga

SEQ ID NO: 731 - DNA, 948 bp, Mus musculus
  MOR189-1
atgcagatggagagccaaaacctcacagtagtgactgaatttatcctcaggggcatcactgaccgccctgagctgcaggttccattgtttggactgtttttcatgatctatctgatctcactgtttggcaacttgggcatgatcatcctcaccatagtggaatcaaggctgcaaacacctatgtacttctttctcagacacctagctatcacagatcttggttattcaactgctattggacctaaaatgttagcaaattttgtcgtcagtaaaaatacaatatcttttcatctttgtgctacacaattagccttctttcttctgttcattgcttgtgaactgttcattctatctgtgatgtcttacgaccgctatgtggctatctgtaaccctctgctctacaatgtcatcatgtcacaaactgtatgttgggtacttgtagcaataccatacctttacagtgtatttatttctctcatagtcaccattaatatcttctcttcatccttctgtggttacaatgtcatccctcatttctactgtgatggtcttcccttgatatctctgctctgcacaaatacagataaaatcggactgataattttaattttatctgccattaatttgatttcctctctcctgatcatccttggctcctatctgctcatcttcagagctattctcagaatgaactctgctgagggaagacggaaggctttctccacctgtggctcccatctgaccgtggtttctgtcttttatgggactttgatttttatgtatgtgcaacctaagaccagtcactcctttgacactgacaaggtggcttccatcttctataccctagttatccctatgttaaatcctttgatctacagtttaagaaacaaagatgtgaaatatgctcttagaaagacaggaaaaattatacaaaataatttctcatag

SEQ ID NO: 732 - DNA, 942 bp, Mus musculus
  MOR189-2
atggagaatcacaacctcacaatggtgactgaattcatcctggtgggcatcactgaccgccctgaactgcaggccccattgtttggactgttcctcatcatttatctgatcacactggtgggcaacttgggcatgatcatccttaccatggtggattccaggctgcaaacacccatgtacttctttctcagacacctcgctactactgaccttggttattcaacagctgtgggaccaaaaatgttaagaaattttcttgtagaacaaaatacaatatcaatttatttttgtgctgtccaattgtctttcttcagtatgttcattgttagtgaattttttattctgtctgcaatgtcttatgaccggtatgtcgccatctgtaaaccactcctctataatgtcataatgtcacaaagagtatgttggctcctggtggcaatcccatacctttacagtatatttgttgctctcatagtcaccataaatattttttcttcttccttctgtggccacaatattatcagtcatttctattgtgatggtctccccttgatatctctgctctgctcaaataaaaaggaaagtgaaatgataattctaattctatcaactattaacttgatttcttcaccagtggtcattcttgtctcctatctgctcattctcagagctattctcaagatgaactctgctgagggcaggcagaaggctttctccacttgtgggtctcatctgacagtggtcactgtcttctatgggactttgatatttatgtatgtgcaacctaagtccaatcacaccttaaacactgacaaggtggcttccatcttttataccttaataatccccatgttgaatcccttgatctacagcttgaggaataaagatgtaaaatatgctcttaggaaaacaggaaaatccatacaaaatatcttctcctag

SEQ ID NO: 733 - DNA, 942 bp, Mus musculus
  MOR189-3
atgaaaaaacaaaacttcacaatggtgactgaattcatcctggtgggcatcactgaccgccctgagctgcaggctccattgtttggactgttcctcatcatttatctgatcacactggtgggcaacttgggcatgatcatccttaccatggtggattccaggctacaaacacccatgtacttctttctaagacaccttgctactactgaccttggttattcaacagctgtgggaccaaaaatgttaagaaattttcttgtagaacaaaatacaatatcattttatatttgtgctgtccagttaactttcttcaatatgttcattgttagtgaattttttattctgtctgcaatgtcttatgaccgctatgtcgccatttgtaaaccactcctctataatgtcattatgtcacaaagagtgtgttgggttctagtggccattccttacatttacagtatatttgttgctctcctaatcagcataaatattttttcttcatccttctgtggacacaatattatcagtcatttctattgtgatggtctccccttgatatctctgctctgctcatatagaaaagaaaatgaaatgataacttttattttatcaattattaacttgattacttcaccactggtcattcttgcttcctatctgctcattctcagagctattctcaggatgaactctgctgaaggcaggcagaaggctttttctacctgtgggtctcatctgacagtggtcactgtcttctatgggactttgatatttatgtatgtgcaacctaagtccagtgactccttaaaaactgacaaggtggcttctatcttttatgccctaataatccccatgttaaatcccttgatctacagcttgaggaataaagatgtaaaatctgctcttagaaaaacagggaaaaccatacaaaatatcttctcctag

SEQ ID NO: 734 - DNA, 897 bp, Mus musculus
  MOR245-6
atgggactctccaattctcgggaacttcagatctttctgtttgcattcttttttgttttctatgtaggcattgtgtttggaaaccttcttattgtcataactgtgaccaatgactcccacctccattcgcctatgtactttctgttggccaacctctcattcatagatctgtgtgtgtcctctgtcacagctccaaagactattgctgattttttctacaaacgcaaagtcatctctgttaagggctgctttacacaaatattcctccttcacttttttggggggagtgagatggtaacccttgtagccatggcctttgatagatacgtagcaatttgtaagcctctaagctacactacagttatgcgtggcaatgtatgtgttagcattgtggctactgcatgggcaattggcttcctacactcagtgagccaattggcctttgctataagcttacccttctgtggtcccaatagggttgacagcttttattgtgaccttcctagagtaatcaaacttgcctgtgcagagacatataggttagacatcatggtcattgccaacagtggtgtgctcagtgtgtgttcttttgttttgctaatcatctcctatggtattattctaatgaccatccaacgccgcccttctgataggtcatctaaggctctgtctacactgactgctcatatcacagtagttcttttgttttttggaccttgcatcttcatttatgcctggccctttcccatcaagtcattagataaattccttgctgtgttttattctgtggtcactcctctcttgaaccccattatatacacactgaggaacacagagatgaaaactgccatgagacgcctgagacaatggaatttaagcttttgggtgaagtcttag

SEQ ID NO: 735 - DNA, 939 bp, Mus musculus
  MOR248-10
atggatggaggcaaccggtctgttgtgtcagaatttatactccagggactttcccactcaaaaaatattcaggtcttactgtttgtgatatttctgatgctttatctgttcattgtgtctggaaatattgtcatcctgaccttaataaccactgacccccatctgcattctcccatgtacttcttgttggccaacttgtcctttgttgatatgtgtctttcctcaaacatcactcctaagatgatcacagattttctcagggaaaacaagaccatttcctttgcaggatgcatgtcccaggtcttttttacccattgcattgctggaggagagatgatactgttggtggtaatggcttatgaccgctatgtagccatctgcaaaccactccactacttcaccatcatgaacctgaagaggtgcactgggttggtgttgacttcttggacaattggatttatacatggtataagttacttggtagtgtttgtgcatctgcctttttgtggtcccaaggaaatagacagtttcttttgtgacatgccacttataatcaagctagcctgcatggattcccataatttaaatactttaatgaatgctgaatgtggggttgtggttgtaacttgctttagtctcttgcttatatcatatacctacatccttgtcactgttagcaagagctctaaagctggagcatctaaggctttgtccacttgcagtgcccacatcactgtagtgatgatcttttttgtaccctgtattttcatctatgtgtggcctctcagcatcacctggtttgacaaatttcttgctgtgttttactctgttattactcctctcctaaatccaaccatttatacactgagaaataaagagattaaaaatgccatgaaaagattcataggcaaatttctaggtcccaaaagaaattcttaa

SEQ ID NO: 736 - DNA, 939 bp, Mus musculus
  MOR245-7
atggatggggagaaccacacagtggtgtctgcgtttgtgtttctgggactcacccactcctgggagattcagctcctcctcctcgtgctctcctcagtgctctacatattaagcatggctggaaacatcctcattgtgttctctgtgaccattgaccctcacttacattcacctatgtacttcctactagcatgtctctccttcattgatttggtagcctgctctgttacttcccccaagatggtttatgacttgtttagaaagcacaaagtcatctcctttggaggctgtatcactcagatcttctttatccatttagttggtggagtggagatggtgctacttgtggccatggcatttgacagatatatagccatatgtaagcccctgcactacctgaccatcatgagcccacgtgtgtgtgttttgtttctgggtgctgcttggggcctgggcattagccactcattgttccagctggcttttcttattgacttacccttctgtggcccaaatacactggacagcttttactgtgaccttcctaaacttctcagattggcctgtagagacacctacaagttgcagttcatggtcactatcaacagtggtttcatctgtgttggctctttcttgttgcttcttatctcttacatcttcatcttgtttagtgtttggaaacattcttcaggtggttcatccaaagccctctccactctctcagctcacatcacagtggtgtttctcttttttggtcctactctgtttatatatacatggccccatcctaattcccagatagacaaatttcttgctctttttgatgcggttcttactccttttctgaacccagttatctacacattcagaaataaagagatgaaggtagcaataaggagagttttcaaaacattattaacctttagaggtatttcataa

SEQ ID NO: 737 - DNA, 939 bp, Mus musculus
  MOR245-8
atgatcagagcaaaccattctgcagtgtctgaatttgtgctgttggggctctcaaattcctgggagatccaggtttttatttttttctttacttgtctgttctatgtatccagtttgacaggaaacttcatcatagttgttacagtcacttctgatccctacttgcattcacccatgtactttctactggctaatctctctgttattgatcttatattttgttccattgcagctcccaaaatgatttgtgatcttttcagaaagcagaaagtcatctcctttggaggctgtatcagtcagatctttttcagtcatgctgttgggggcactgagatggtactgctcatagccatggcctttgacaggtatgtggccatatgcaaaccattacgctatctgaccatcatgagcccacggatgtgcctgctaatattagttgctgcttggatcattggtctcatccattcatcagcccaattggcttttgttataaacttgccattctgtggccctaacatactagacagcttttattgtgacataccacgacttgtcaagcttgcatgcacagatacttataaactggagctcatgattactgccaatagtgggttcatttccttgattgcgttctttttactcatcatctcctatgtctttcttctcaccactgtccagaagcagtcctcaggatgttcatccaaggccctttctactctgttggctcatattacagttgtagttttgttttttggcccattgatttttttctatgtgtgcccttctccttcaacacatgtagataaatttctagctatatttgatgcagttttgactccctttctaaatccaattatctatacattgaggaacagagatatgaagatagccatcaggaaagtgttttgtcaatgcctggcttttagaaaatcaatgtag

SEQ ID NO: 738 - DNA, 966 bp, Mus musculus
  MOR245-9
atgtattttccccaactttctgatccaatggaccaagttaatgcttctgctctacctgaatttgttttgctgggacttgcacaatcgtttggaacacagattttctttggcctcttcttctccttattttatgtggggattctttttggaaacctcttcattgtgttcatagtgattgttgattctcatttacacttccccatgtatattctattggccaacctttcgctcattgacttgggcctttcatctacaacaattcctaggacaatatctgatctttttactggctgtaaagtcatttctttccacagctgcatgacacaaatgttcttcattcatgtgatgggtggagttgagatggtactgctcatagccatggcatatgacagatatatagcaatctgcaagcctcttcactacctgatgatcatgaatcccaaaaaatgtataattttggtaatagcagcttgggtcatagggatgattcatgcagtgtctcagtttctgtttgttgtaaatttacccttctgtggtccctacaatgtaggaagtttttattgtgattttccaagggtcattaaacttgcatgcatggacacttataaactagaatttgtggtctctgccaacagtggctttatttctatgtgtaccttcttttttctgattacatcatacatttttatcctggccagtgtacgacaacattcttcaactgatttatccaaagcatttgtcaccttgtcagctcacatcactgtagtggttttgtttttcataccatgcatgtttctgtatgtatggccatttccgaccaagtcacttgataatttctttgctattgttgactttgttctcactcctgtcttaaatcctactatctatactttaaggaataaagatatgaggttggccatcagaaggctaagtagacaggttttaagttctagggaatttatatag

SEQ ID NO: 739 - DNA, 936 bp, Mus musculus
  MOR256-31
atggacccaagcaattacagtactttgcatgtttttatcctgcttggattctctgaccaccctcacctggaaatgatcctctctggagttgtcaccttcttttacattattacactggtgggtaacactgctataattcttgcatccctcctggatccccatctccatacaccaatgtactttttcctcaggaatttatctttcctggatttgtgttacacaacaagcattgtccctcagatgctggttaacttgtggggacccgaaaagaccattagctctgtgggctgtattgttcagctctatgtgtatatgtggctgggctccattgagtgtctgctcctagctgtcatgtcctatgatcgtttcacagctatttgtaagcccttgcattactttgtaatcatgaatccacgtctatgtgtcaagatgatagtcatggtctggggtattagtttggccaactctgtaatattatgcacactcactgtgaatttgcctcgatgtggacacaacatcctggaccacttcctgtgtgagttgccagccatggtcaggatagcttgtgtggacaccacaaaagttgaattatctgtttttgctctaggcattgtcattgtccttacacctctcatccttattcttatttcctatggctacatagccaaaactgtgctcaacatgaagtcaaaggcagggcaacaaaaagcaatgaatacctgtggatcccatctcactgtggtctccatattctatggaagtattatctacctgtatctacaacccggtaacagggcctctaaggaccagggcaagttcctcaccctcttttacaccatcatcactccaagtctcaaccccctcatttacaccctaaggaacagagacatgaaagatgcactgaaaaaactcatgaggttttaccacagattcgcc

SEQ ID NO: 740 - DNA, 942 bp, Mus musculus
  MOR259-1
atgattccagggcagaaccaaagttgggtctctgagttcatcctgattggcttctccagtgaccccacgaccaacagcatcctcttcattgtcttccttctcatctacctgagctcagtcctgggcaatgggctcatcatcatgctggtctgcctggacacacagctgcacactcccatgtacttcttcctctctaccctctccctattggatatgagctttgtcaccactaccatgccccagatgttggtgcatcttcttgctcactctcagaccatctcatttgctagttgctgcctgcagatgtttgtttttggtgccctgggtataactgagtgcaccttctttgttgtgatggcttatgaccggtatgtggccatatgctatccattgcgctatactgtcatcctcaactggggcttgtgcatacggttggcagcagggtcttggatctgtggtttcttttcctctttattgcatactttcttcaccatgagtctgccatactgtgggcccaacagggtcaaccactacttctgtgaaggtccttcagtgcgtagcttggcttgcatggatacccacctcattgagatggtggactttgtgttgagtgtttttgtggttgttattccaatttccctcattgtggcctcctatattcgtattgccatggcaattctcaaaatcaagtccacccaggggcgctgcaaggctttctctacctgtgcctcccacctgactgtggtcacattcttttatgctccagccacttacatctaccttaggcccaactccagctactcccctgagcgagacaaacaggtctcactcttttacaatgccttcacagccttgctcaaccctgtggtctacagtctgaggaacaaggacatcaagagggcatttctcaaggtgatgggacatagtaggctggaccagtga

SEQ ID NO: 741 - DNA, 948 bp, Mus musculus
  MOR102-1
atgaagaaaatgaattaccaggaaattggaaactataccaaagtgactgaattcattcttgtgggactctctaggcatcccacatcccagagtgttgtcttctggacactgatgtttctctatatagttactttggcaggaaacagtttgattattttcctagtaggaggcaactctcaattgcacacaccaatgtatttctttcttggtaacttgtctttactggatcttctattttccaccagtgttgtacccttgatcatggtgaattcattgtataacttctccactatctcctacagctcctgttttacccagcttgctttcagggctttcttagcactggccgaatgttttctgcttgccattatggcttatgatagatttgtagctatttcaaatccactcaggtataatctggttatgtcttctcgagtatgtattttcatggctttgcttgcctggatggcagcccttcttctcactgttctgcccattctaatctttccaatcagtttctgtgggcagaatgtagtcaatcatttctcctgtgaggttcaagccatcttcaaattgctctgttctaataccatttctttacagattatgatgatagcttgtgctgtcatttcaatgccagtacctttaatgttcattcttttctcttacctttgcatcctcaaggctgttttaagaatccatccaactaaggccaggcttaaagccttttctacatgtgcctctcacttgattgtggttactatctactttggcacactaatatatatttatatgagaccacagagcaaaatatctcacaatggggacaaaattgtctcaatattttatgcagcagtgacaccaatgctaaatccactcatctataccctaagaaataaggacgtgaaagctgttctcaggagggtaaattgtggggtcaagtcctaa

SEQ ID NO: 742 - DNA, 909 bp, Mus musculus
  MOR183-4
atgaaaaattcaactgtgctgacagagtttgtgctcacagggctcacagagtctccagagctacaggtgcccttgttcttgttttttctggtgatctatctcattactattgtagggaaccttggtctaattgctcttatctggaatgaccctcacttacatatccctatgtacttctttcttggccatctggcttttgtggatgcttccctatcatccacagtggcaccaaagatgttactcgatttcttacagatgaataagatgatttcctactctgaatgcatgacacaattctttatctttgcaatctgtgttactacagaatgtttcttgttgtcagctatggcatatgatcgctatgtagcgatatgcaaacctttactttatccaatgattatgactaagagactatgtatatgtctcttagtcctgtcttttgtaggtggaattcttcattcttcaatacacgagggatttctattactactaaatttctgtaattccaatatagtacatcactttttctgtgacatcgttccattgctaaagatttcctgtgctgacactactcttaattttcaactgatatttgtttttgctggaataattcaagtcttcacggttgtgattgttcttgtgtcctatacactagtgctatttacgattttgcaaaggaagtctgtccaaagcatgaagaaggctttctctacctgtggtgcccatctcttatctgtgtctctgtactatgggcctcttctcatcatgtatattttccccgtgtcccaagaagcagatggtcaagatatcatagactctctgttttacacggtaataattcctgtgttaaatccaattatctacagcctgagaaacaagcaagtcatggattctcgaaaaaggtgttaa

SEQ ID NO: 743 - DNA, 912 bp, Mus musculus
  MOR248-11
atggagaaaataaaccactctgagatatctgaattcattattcttgggctttgtgactcttgggagctccaggcatttttcttagtgatctttacttcactttatttaatcaccatttttggcaacatattcattgtagtcctaattatcactgaccttcatctccatactcctatgtacttcctgttggccaacctctcgttcattgacttctgtctttcctcagtaactacacctaagatgatcatcgacttcctcaaggaaataaagacgatctcttttggagggtgcatgtgtcagattttctttggacacttctttggagggggtgagatggtactgcttgtatcaatggcttatgaccgttatgtagctatctgtaagccactccattactccaacatcatgagcagacatatgtgcattggattagtgatggcgtcatggatgattggctttgtgcattcaataagccaactggttataattgtaaatctgcccttctgtggatccagagttttggacagttttttctgcgatattccattggtaatcaagctagcctgcttggacatctatgttctagaaattttgataaatgctgacagtggtgtgctagcagccatatgctttgttctgttgctggtgtcctatttccatatcctgactactgtctgccttcactctaaggatggggcatccaaagctctctctacttgtactgcccacatcacagtggtggtattattttttgggccctgcatcttcatctacctgtggccagtcagcataacctgggtggacaagtttcttgctgtgttttatgcagttatcacacctcttctgaatccagccatttatactttaagaaacaaagagattaaaactgctatgaagagattacaatgctag

SEQ ID NO: 744 - DNA, 939 bp, Mus musculus
  MOR245-10
atgaatgaaataaattacaccgaggtgtctgaatttgtgtttctgggactttcaacatctaaacacatacagcatttctttcttgccttctctgtggtattttatgtgaccattgtgctgggcaatactcttgttgtatttactctagcctttgacccacatttacattcccctatgtactttcttttgggaaacctctcatttattgacttatgtctttccaccttaaccgtacccaagatgatttctgacctgtcctctgggcataataccatctcattccagggttgtgtcttccagatatttgttcttcatgttcttggggcatctgagatggtattgctggtagccatggcctgggacagatatgtggccatatgcaaacccctccactatttaaccatcatgagcccacggatgtgcctattgcttctatctggggcttggattattggctttttacattcagtggcccaactaggttttgttgtccatttgagattttgtggacctaataagatagatagtttttattgtgatcttcctaggtttatcaaactggcctgcatagacaactacagaatggagttcatggttgctgccaacagtggcatcatttctattggcaccttcttcttactgataatctcctacattgttatcctgtttaatgtaagaaaacattcatcaggagatttgtccaaggccctctcaacactttctgctcacatctccgtggtagttttgttctttggaccatgcatcttcgtgtacatgtggccgtttcctactgtgccagtggataagttccttgccattctggacttcatgattacacccatcctgaaccctgccatttacacgctgaggaacaaagacatgaaggtggcaatgaggaaactgagttatcagttcttgaattttaggaaaatgtcctga

SEQ ID NO: 745 - DNA, 942 bp, Mus musculus
  MOR245-11
atgtttaagaaaaattataccaaggtgtctgaatttgtgtttctgggactttcatcatctagaaaaatccggcctttcctccttgccttctctatggtactttatgtggccatcgtgctgggcaatacccttgttgtgtttacgctagcctttgacccacatttacattctcctatgtactttcttttgggaaatcttgcgtttattgatttatgtctttctaccttaactgtacccaagatgatttctgatctgtcttctgggcacaatgccatctcattccagggttgtgtcttccagatatttgttcttcatgttcttggggcaactgagatggtattgttggtagccatggcctgggacagatacgtggccatatgtaagcccctccactacctgaccatcatgagcccaagaatgtgccttatgcttctatctggtgcttgggttattggctttttacattcagtgacccaattagcgtttattatcaagttgaatttttgtggtcctaatgagatagatagcttttattgtgatcttcctcagtttatcaaactggcctgcatagaccccaagaaaatgcagttcatggttactgccaacagtgggtttatttccatgggcacctttttgttattgataatctcttacattgttatcctgttcattgtaagaaaacattcatcatcaggtgatttgtccaaggccctctctacgctttctgctcacatctctgtggtagttttattctttggaccatgcatctttgtgtacatgtggccatttcctacggtgccagtggataaatttcttgccattctggacttcatggttacacccatcctgaaccctgccatttacacactgaggaacaaagacatgaaggtggcaatgagaagactgattactcagctattcaatctgaggaaatcgccctaa

SEQ ID NO: 746 - DNA, 942 bp, Mus musculus
  MOR245-12
atgccgatggatcaactaaatgactccagagtttctgagtttgtgcttctaggactctctagttcttgggaaactaaagtttttctcatggtaacattctctatgctctacatcggaatcattttgggaaatcttttcattgtcattttagtaattgctgactctcacttacattcacctatgtacttcctgttggccaacctgtctttgaacgatgtgtgggtttcctccactacagttcccaagatgatctcagatcttctgaaagagcacaaagtaatttctttccacaattgcatgactcagatctgttttatccacattatgggaggagtggagatggtgctgctcatagccatggcctttgacaggtacacagccatctgtaagcctctgcgctacttgagcatcatgagccctagaatatgcatttcatttgtaattgctggctgggtcactggagtggtccatgccatgtcacagttctcttttgttgtgagcctgcctttttgtggtcctaacaaagtggacagcttttactgcgacttccctcggatcatacaactggcgtgcactgatggagacaagtttgagtttgttgttgctgccaacagtggcttcatgagcatggggaccttcttcttgcttcttctctcctatgtcttcattttggtcacagtctggcaaaggtcttcaggggacttgtcaaaggcgcttgtcactctgtcagctcacatcactgtggttgttctgttttttactccatgcatgtttctctatgtgtggcctttccccacatcatcgatcgacaaatacctgttcattgctgactttgctatcactcctgctcttaatcctgtcatctatacattcagaaacaaagatataagaatagcaattggaagattaagcaaaagggctgtttgtagcagattttgctga

SEQ ID NO: 747 - DNA, 951 bp, Mus musculus
  MOR274-2
atggatggaaacaaaacctttcccagtgacttcacctttgtgggactctttactcacaacaaagcctcaggattcctgttcagtgtcatatgtgccacgttcttcatggccatattggcaaatggggttatgatctttctcattcacatagaccctcacctccacacccccatgtacttcctcctcagccacctctccttcattgacatgatgtatatctccactattgtgcctaagattttggttgattacattgtaggcaaagggatcatctcttttgctgcctgtacagcccagtactttctctacatgggctttgtaggggccgagttcttcctgctgggacttatggcctatgaccgctacgtggccatctgtaatccgctccgttatcctgtcctcatgagtcggagggtctgctggtttattttggccagctcttggttcggtggggctttggacagtttccttctcactcccatcaccatgagtctcccattctgtgcatcccacaagattaatcactttttctgcgaggctcccacaatgctgaggctggcctgtggtgacaaagccatatatgaaatggtgatgtatatctgctgtgttgtaatgctgttggtccccttctctgtggtgatcacatcttatgcccagatactggtcacagtacatcacataaagtctgaagaagggaggaagaaggcttttgccacctgctcatcacatgtgattgtggtgacattgttttatggggctgctttgtacacctatatgcttccccaagcctatcacaccccactcaaagataaaatcttctcagccttttataccatcctcacccccttgctcaaccctgttatttatagtctgaggaacagagatgtggcaggggctttaaagagggtgatagcaagacacagaggagcctgcagtgtggaaagaaaataa

SEQ ID NO: 748 - DNA, 951 bp, Mus musculus
  MOR190-2
atggagaaccacaacctcacaatggtgactgaattcatcctgatgggcatcactgcctgccctgaactgcagcctccattatttgttctgttcctcataatctatctgatatctctgattggaaacttgggcatgatcatccttaccttggtggactccagactacaaacacccatgtacttttttctcagacacctctctactacagaccttggttatacaacagctgtgggaccaaaaatgttacaaaattttcttgtagatcaaaatacaatatcatttcatctttgtgcgattcagttgtctttctttagtatgttcattgcttgtgaaatttatattctgtctgcaatgtcctatgaccgctatgtggctatctgtaagcctctgttctatatggtcatcatgtcaaaaagactatgctgggtgcttgtagtaatcccttatgtctactgtacaattgtggctcttttaatcacaattaagattttcactttgtctttctgtggttccaatgtcatcagtcatttctactgtgacagtcttcctttgttatctttggtctgctcaaatacacaagaaattgaggtgatattgttgtacttatcagcttttaatttgatttcctctcttctgcttgttcttgtgtcctacctgctcattctcatagctattatcaggatgcactctgctgagggcaggcgcaaggctttctctacctgtgggtcccacctgacaatggtcactgtcttctatgggactttgatatttatgtatatgcagcgcaaatccagtcattcctttgatactgataaagtggcttcaatattttataccatggttatccccatgttgaatcccttgatctacagcttgagaaataaagatgtaaaagatgctctccatagaacattgaaaaaaatacatggttttcttttgaaattgacatag

SEQ ID NO: 749 - DNA, 930 bp, Mus musculus
  MOR216-1
atgtcaatggagaattcatctacagggactaaattcatccttcttggtatgacagataactatcagcttgcagtcctactttttggactcttttttattatttatttcatcactgtgctggggaacctagggcttgtggtactaattcaagtcagccaccgcctccatacacctatgtatttttttctctcaaatctgtccttccttgatgtctgtttctcttccatcacaaccccaaagactttagtcaacttgttatctcaactacaggaagtttctttctttggatgcatggctcaaatgggcttgttcatagtcttcgcttctgctgaatgtaacattttggcttctatggcctatgaccgatacacagccatctgtcggccattgctttaccatattaccatgtcaaaagttcgttgtctcctcttggtagcaggatgttaccttggtgggttacttaacatggttgctgtaacaacttccatcacacagctgtcattctgccagccacaggtcatctcacacttcttctgtgatatccccccactgctggccttggcttgttctgatccctgggtaacccaagtcttggtagttggctgtggtggattcacccttgtcacctctgttatggtaattcttgtctcctacctgtctatattcatgactatcatgggcatcccatcagtttctggcaaacagaaagccttctccacctgtgcgtcacacttgactgcagttgctctgtactatggaacaactatgtacacgtatttgcaaccctctcggcatggatctcaagcaggaaatcggatgatctcggtgttttataccatgctgattcccatgttgaatcctctcatctacagtttgagaaatcaggaagtgaaagttgccctacagaaaatactgaggcacagtcaataa

SEQ ID NO: 750 - DNA, 927 bp, Mus musculus
  MOR222-3
atggccaatctctccacagtgtctgtgttcattctccagggcttctctgctgttcctgcattacagttgctgagcatggccatctttcttctcatatacctggctgcggttctggggaatgtctctatcatgatagctgtgactcttgactcccatctgcacacacccatgtacttcttcatcaaacacctctccctagtggatctctgttctacatccaccaccctgcctcgggccctggtggctaccatggcagacaccaaagagatatccctcccagcctgtgcatctcaactctttgcttttgtctgctttggctctctggaatgttttctcatcactgccatggcttttgaccgctgtctagccatctacagacccctgacatatggggtaaccatgagttctcagacctgtgtgtccctggtagtggtggcctgggtcagtggactcctcttttctaccttccacatggtcaacactttctccttgcccttctgtggtcccaacatgattgatcacttcttctgtgacatccccccactcatgcatctagcttgtggtgacacccaaggccatgaggctgcaggttttatagttagtggatgtgtcatcatgacttgctttgccctcacttgcctgtcttatgttcttattgtatacacagtggttcacatccgttctgcagctggccgctggaaggccttctccacgtgttcctcccatctggccacagtgcttctgttttatggcactggaagttcagcctacatgcagcccacagcccactactccccactgcaagggcgcatggccgccatattctattctatcctcatgccaactctgaatccacttatctacagcctcagaaacaaggacatgaaagcagctctgcggaagctttatccacaggtgccatcctag

SEQ ID NO: 751 - DNA, 960 bp, Mus musculus
  MOR103-11
atgctattttgctctccacagatggagacatcacttgagttgaccaacatgaccagagtccaacagtttgtgctgttaggttttcctacaaggctggggataagggacgccctgtttgttgtcttcctgagtctctacctgctgaccctcctggagaacacactcatcatctacctcatctgcagtcacaaagagctccacaagcccatgtacttcttcctgggcaacctcagctgcctggagatgtgctatgtgtcagccaccatgcccaccttactcgtgggactgtggacggggccctaccacatttcctttataacttgcatgacacaactcttcttctttgtctctctcatatgcacagagtgcaccctcttggcctccatggcttatgaccgctatgtagccatttgccgcccactacactacccactgctcatgaggccacaggtctgcctgggcttagccttgtcttcgtggctgggtggccttgtggtctcggcgataaagacaaaatgcattgcaagcctgatctactgtggtcccaatgtcctcaaccaatttttctgtgatgtctcccctctgctcaatttgtcctgtacccatgtggccctcacagagctggtagacttcatctcagccattgtcatcttctgtggaacactcttggtgtccctagcctcctattcagctattgggatggctgtactccgcatgccatcagctgctgcccggcgcaaggccttctccacctgtgcctcccatctggtagtggtgggcatcttttactcagcagctctcttcatctattgccgccccagccgcatcaagtccatggacctcaacaaggtgctgtctgtcatctacacagtggtcacacctctctgcaaccctatcatctactgtctgagaaataaggaggtccacactgtgctgaaaaagactctccattggccttga

SEQ ID NO: 752 - DNA, 918 bp, Mus musculus
  MOR182-6
atggagttgaacaggacccagctgactgaatttgttctcagaggaataacagatcgttcagagctgcaagtccccctgttcctggtgttctttctcatctatgttatcaccatggtgggcaaccttggcttaatctttgtcatctggaaggaccctcatcttcacacacccatgtaccttttccttggaaatttggcttttgctgatgcctgtacttcatcctctgtgacaccaaagatgcttatgaaattttcaaataagaatgacatgatatccatgggtgagtgttttgctcaattttattttttttgtttaagtgcaactgcggaatgtttcatcctggtagcgatggcctatgaccgctatgtagccatatgcaaacctctgctctatgtagtggtgatgtccaacagactctgtattcagttcataggtgtatcctatctaattggacttctacatggtctacttcatgtaggattgttatttaggttaatgttttgtagttccaatgtaataaatcatttctactgtgaaatcctgccactttatagaatttcttgcactgacccatctatcaatgtactggtagttttcattatgggtattttaatacaagtgagtacctttatgagtattatagtctcctatatcctcatcctctttgccatcctgagaacaaagtctgagaggggcagaaacaaagccttctctacttgcagttcccacctgtcatctgtatctttgttctatggcactctcttcatcatatatgtcctctctggctctgacacagataattatcagggtaaaatgtattcactgttccataccattatcattcctctgctgaaccccttcatttacagcctcagaaacaaagaagtcatcggtgccttgagaaaactcagagaatga

SEQ ID NO: 753 - DNA, 945 bp, Mus musculus
  MOR120-2
atgttggggaatcacactagtgccactgaattttatcttgttggttttcctggctctgtaaacctacgccacatcctttttgctaccttctgctttttttacttagtgaccttagtgggaaacacggtcatcattgtgatcgtctgtgttgataaacgtcttcagtcccccatgtatttcttccttgttcacctctccatcctggaaatcctggttacaactgttattgtgcccgtgatgctctgggggctgctgctccctggaatgcaaagtatatctttggctgggtgtgttgcccaactttttctgcaacttgctctggggaccacggagttttctttgcttggagcaatggccgtggatcgttatgtagctgtctgtaaccctttgaggtacagtgtcatcatgaacagtcgcacctgcaactctgtggtaattgtgtcatgggtctttgggttcctttttcaaatctggccagtttatgccacatttcaccttaactactgcaaatcaaatgtggtggataatttcttctgtgaccgaggccagttgctcaaattatcctgcaataatactattttcatagagtttatcctttttctaatggcagtctttgttctttttggttctctgatccccacaattgtctcctacacctacatcattgccaccatcctcaagatcccctcagcttctggccggaggaaagccttctccacctgtgcctcccacttcacctgcgtcgtcattggctacggctgctgcttgttcctctatgtgaaacccaagcagacccaggcagccgactacaatagggtggtttccttgatgatttcgatcgtaactcctttcctcaaccctttcatcttcacactccgtaatgacaaagtcatagaagcccttcgggatggagtgaaacgctgctaccacttcttcaagagctag

SEQ ID NO: 754 - DNA, 942 bp, Mus musculus
  MOR120-3
atgttgggaaactactctagtgccacgaaattttttctgttaggttttcctggcaccaaagaactacaccacatcctttttgcgaccttccttcttttgtactcagtgacggtcttgggaaatatgctcatcatcatagtagtccatgctgacaaacgtctgcagtctcccatgtacttcttccttggtcacctctctgtcctggagatcctcatcacatccgtggctgtcccttatatgctccaggggcttcttcgacagacgcagataatatctttgtctgcttgttgcgtacaactgtatttgtatctttctttggggagttcagagttaatattattaggggtgatggcagtggaccggtatgtggctgtctgcaaccctttgagatacaatgtcatcatgagcagctatacttgtacctggatggtaacagtgtcatgggtagttggattcctctttcaaatatggccagtctatgccacatttcagcttactttctgcaagacaaacctattagatcatttctattgtgacctgggacagttgttcaagctatcctgtgaaaacacccttttcacagagttgattctgtttttaatggctgttttcattattgttggttccatgatccttacaattatctcttacacatacatcatttccaccatcctcaagatcccctcagcttctggccggaggaaagccttctccacctgtgcctcccacttcacctatgttgtgattggctacggcagctgcttgttcctctatgtgaaacccaagcagacacaggcagcagagtacaacagggtggtttcactgctggtgttggtggtggaaccctttctgaatcctttcatcttcactcttcgaaatgacaaattcatagaggccttcagagatggagtgaagcgctcctgccaacttctcaaacattag

SEQ ID NO: 755 - DNA, 936 bp, Mus musculus
  MOR245-13
atggatcaaataaatgaaactgtagcttttgaatttgtgttgttgggactctccagttcttggaaaaatacaatttttctcatgtccaccttctctttgctctatgtaagcatcatcgtgggaaaccttttcattgtctttttggtaattaatgactcccgtttacagtctcctatgtattttcttttggccaatctgtccctcattgatgttggactttcctctaccacagtgcccaagatgatctcagatcttctgaaagagcacaaagtaatatctttccacagttgcatgactcagatctgctccatccacattatgggaggagtggagatggtgctgctcatagccatggcgtttgacaggtacacggccatctgtaagcctctgcactacatgagcatcatgagccctagaatatgcatttcatttgtaattgctggctgggtcactggagtggtccatgccatgtcacagttctcttttgttgtgaacctgcctttttgtggtcctaacaaagtggacagcttttactgcgacttccctcgaatcatacaactggcatgcacggatagagacacatttgagtttgttgttgctgccaacagtggcttcatgaccttggggaccttcttcttgcttctcctctcctatgtcttcattttggtcacagtctggcaaaggtcttcaggggacttgtcaaaggcgcttgtcactctgtcagctcacatcactgtggttgttctgttttttactccatgcatgtttctctatgtgtggcctttccccacatcatcgactgacaaatacctgttcattgttgactttgctgtcacccctgctcttaatcctgtcatctatactttaaggaacaaagatatgaaggaagccataaaaaagctgagcaagcagagatgttacatcagaattttctga

SEQ ID NO: 756 - DNA, 984 bp, Mus musculus
  MOR24-2
atgaagaggaagctaagacatttaacagttgttatgtctatctacaataaatctgatgtccatccctcaacctttatcctcattggcattcctggcttggaggcagcacacatgtggatctctattcccttttgcatggtctacgttttagcattaatgggaaacagctcacttcttttcatcatcaagacagactccagcctccatgagccaatgtacctcttcctctgcatgttggcagtggctgaccttgtggtgtgcactacagctgttcccaaacttctcagtctcttctggtttcacgatggagagattcgctttgaagcttgcctcactcagatcttcctgattcactcttgctcaaccatggagtctggctttttcttggccatggcctttgaccgttatgtagcaatttgtaacccattaagacactcagctattttgacacacactgtaactggaggaataggtctagctgttgtcattcggggaatagcccttctcagtcctcaccctttcttgctacgctggcttccctactgcaagacaaatataatttcccacacttactgtgagttcatggccctcatcaagattgcctgtgctgagacaagcatccgcagagcttacagcctcatcgttgccttcctcacaggcggagtagacttcatattgatcatttgctcttatgtcctcatactcaacacagttttccaccttcctaccaaggatgccagactcaagactctgggcacctgtggctcacatgtctgtgtcatcttagtgtcctacaccccagccttcttctccttccttacccatagatttgggcacaaggtggctccccaagtgcatatatttgtggccaacatctatcttcttgtgccacccatggtcaaccccattatttatggtgtgaggacaaagaaaatacgaaacagattcctcaaagttttcaggttttcaaagcacacaaattga

SEQ ID NO: 757 - DNA, 1026 bp, Mus musculus
  MOR38-2
atgcaggttgtttctttgttgctcccttcaggtactttaccagggtccaccatgatgccttgcaacagcaccagccacccttctttcttcattctccaaggcattcctgggatggaagacaaacacaaatggatctccatccccttctcctccatgtacttcatcaccgtgatggggaactgcaccattcttctcaccatctccatggaacgttccctgcacaagcccatgttcctgcttctcttcttcctggccctcacagacttgggtatgtctacgaccaccattcctaaggtgctctgcatattctggtttggacagagtcagataagctatgaaggctgcttggtccagctgttcttcatccattccatatctgccatgcagtcatctgtcctgatgaccatggcctttgaccgttatgtggctatctgtaagcccttgcgttattccaccattctttccaatagtcgcattggactcattggcctagcaagcctggttagagcaatcctctttattctccccatgcctatcctcctccagcgtatgccctttcatgccaatcgagtcatccccaccacctactgtgaacacatggctgtggtgaagatggtatgtgtcgataccacattcaataggatatatggtttggttgtggctatgctggtggttggggtagacatctcagctattgcctcatcttatgcattaatcctacgagctatcatgcatctctcttccaaggaagcccaccacaaagcagtcaacacctgcaccacacacatctgtgtcatgcttgtctcctacacccccagtcttttctcttttctgactcatcgctttgggagaggcattccacctcatgtccacactattcttggcaacctttacttccttgtaccaccaatgcttaatcctattatttatggagtaaaaaccaaggaatttcgggacaaaattactaaatatttatacaggagaaaggagcctataattttttctcacaatcagaaacttgtttga

SEQ ID NO: 758 - DNA, 984 bp, Mus musculus
  MOR103-15
atggagcgaaggaaccacactgggagagtgagtgaatttgtgttgctgggtttcccagctcctgccccactgcgggcactactatttttcctttctctgttggcctacgtgttggtgctgactgaaaacatactcatcattacagcaattaggaaccaccccaccctccacaaacccatgtattttttcttggctaatatgtcattcctggagatttggtatgtcactgttacgattcctaagatgcttgctggcttcattggttccgaggagaatcatggacagctgatctcctttgaggcatgcatgacacagctctactttttcctaggcttgggttgcacagagtgtgtccttcttgctgtcatggcctatgaccgctatgtggccatctgtcacccactccactatcctgtcattgtcagtagccggctatgtgtgcagatggcagctggatcctgggctggaggttttggtatctccatggttaaagttttcctcatttctcgcctgtcttactgtggccccaacaccatcaaccactttttctgtgatgtttctccattgctcaacttgtcatgcactgacatgtccacagcagagcttacagactttatcctggccatttttattctgctggggccactctctgtcactggggcttcctatatggccatcacaggtgcagtgatgcgcatcccctcagctgctggccgccataaggccttttcaacctgtgcctcccacctcactgttgtgattatcttctatgcagccagtattttcatctatgccaggcctaaggcactctcagcttttgacaccaacaagctggtctctgtactctacgctgtcattgtaccattgctcaatcccatcatctactgcttgcgcaatcaagaagtcaaaaaagccctacgtcgcactctgcacctggcccaaggccaggacgccaataccaagaaatccagcagagatggttag

SEQ ID NO: 759 - DNA, 963 bp, Mus musculus
  MOR114-11
atgagaaaccacacagtaatgacaacattcatcttgctgggacttacagatgatccaggtctccaacttctgttttttgtcattttatttctgacatatattctgagcataatggggaacctgacaatcatcattctcaccctgatggactctcatcttaatacacctatgtatttttttctccgaaacttctccttcttagaaatctcattcacaacagtctgtattcctagattcctgtacagtatatcaactggggttaataccataacatacaatgcttgtgccagtcaaatattttttgttggactctttggagctacagagttttttctgctggcagctatgtcctatgaccgctatgtggccatctgcaagcccttgcactatatgaccatcatggacaacaaagtttgtgccatccttgtcctctgttgctggacttctgggctgctggtcattatcatacctcttggcatgatcctacagctggaattctgtgactctaacaccattgatcactttttctgtgatgcatcgcctcttatcaaaatctcatgctcagatacatggtttttggagcagactgtcattgtttgtgcagtgctgactttcatcattacattaatagtcgtgattctctcttacatatacattatccggacaattctcagattcccttctgctcatcagaggaagaaagcattttccacctgctcttctcacatgattgtagtttccatcatgtatggcagctgcatttttatctatgtgacaccttctgccaaagaacaggtagatatcaataaaggagtatctatgctcaatacatctgttgcccctttgttaaatccatttatttatactttgagaaataagcaagtgaaacaagcttttaatgatacagtaaaaaaattgcatacctcttacaccaataagaacatgttggatttaagcagttag

SEQ ID NO: 760 - DNA, 972 bp, Mus musculus
  MOR218-7
atgactccaagaaacatgacaacagtgagtggattcctcctcatggggttctctgacaaccatgagctgcagatcttacaggctttgctcttcttggtgacatacctattggattcagcagggaacttcatcattatcaccatcacaacaatagacaaacagctccagtctccaatgtattactttctgaagcacctttccattatggacttctcatctctctctgtcacagttccccagtatgttgacagttccctggcacgaagtggctatatttcatatgggcagtgcatgctgcaggtttttttcttcacaggtttagcctggagtgaggtggccattctcacagtgatgtcttatgaccgctatgtggccatctgcctcccactgcactatgaggtcataatgagtcccagaaagtgcacttgggctgtggcagctgtgtggctaagtggaggtatctcaggaacattattcacagcaagtacactctctatcagattctgtgggcacaaaattattcaccagttcttctgtgatatcccgcaattgctcaagctctcctgctctaatgatgactttggactactgaaagtgtctactttcattgctgtaatgggatttgcctgctttgtggggattgccttctcctattgccagatattctctacagttctcaggatgccctctgctgaaggccgatctaaggtcttctccacctgcctgccccatctcttcgttgtttcattttttctctcaacaggcatttgtgcctatctaaagccaacctcagactcaccaactgctttagacctcatgctctctatcttttacacagtactacccccaaccctcaatcctgttatctatagtctaagaaatgagtccttgaaaagagctgtaaagaagttacttttaagtgaagaattcattgggaaaaattatgtttgttctgtttttagtgcctgctaa

SEQ ID NO: 761 - DNA, 972 bp, Mus musculus
  MOR107-1
atggagccccaaaacctatccaaggtcacggagtttcagctcttaggattccagaaccttcttgagtggcagtccctcctctttgccatcttcctgtgcttctatctcctcaccatcacaggcaacatggtgatcatcggcgtggtgagtgaggatccgcgcctgcgcgcgcccatgtacactttcctccaacatctgtccttcctggagatttggtacacatccaccacggtacccctgctgctgtccaacctggcctcctggggacacatgctgtccttctccgcctgcatggcccagctgtacttctttgtgttttttggggctaccgagtgtttcctccttgccgcaatggcttatgaccggtacctggccatctgccacccgctccactactctcttctcatgagccctgacaactgcgctgctctggtaacagtctcctgggtgacaggggtgggtacgggcttcctgccttccctcctgatttctaagttggacttctgtgggcccaaccgcatcaaccatttcttctgtgacctccctccgttaatccagctgtcctgctccagcgtctatgtgacagaaatggccatctttgtcctgtccatcgctgtgctatgtatctgtttcctcctaaccctggtgtcctacgttttcatagtgtcctccattctgagaatcccctccacttccggcaggatgaagacgttttctacatgtggttcccacctggctgtcgtcaccatctactacgggaccatgatctccatgtatgtacgcccaaatgcacatttgtcaccggaactcaacaaggtcatttctgtcttctacaccgtggtcactccactgctgaacccagttatctacagcctgaggaacaaagacttcaaagaagctgtgagaaaaatcgtgagaaccaagtgtggggtctacagagccagagtgaaaggaagtgccctcactacgtag

SEQ ID NO: 762 - DNA, 978 bp, Mus musculus
  MOR164-3
atgaaatatttttgtctgcccagattttcaataataagcatgctgactggaaatggctcctttgtgactgagtttgtccttgctggtttgacagatcgtccagagctccagctgcctctcttttacctgtttctaataatctacactgtcacagtggtgggaaacttgggcttgatcatcctgattggcctcaatcctcacctgtacacccccatgtactatttcctcttcaacctctccttcattgatctttgctactcttctgtatccagtcccaagatgctgatgaactttgtctttgagaagaattccatctcctatgaggggtgcatgactcagctatttttcttcctcttttttgttatctctgaatgctacatgttgacctcaatggcctatgatcgctatgtagccatctgtaatccactgctgtataaggtcaccatgtccccacaggtctgctcaatgctatcatttgcttcttatgggatggcatttgctggagcctctgcccacacaggctgcatgctccgactgatcttctgcaatgccaatgtcatcaacttttatttgtgtgacattctgcccctcctccaactttcttgcaccagcacctatgttaatgaagtcgttgttctcatagttgtgggtattaacatcacagtccccagcttcaccatcctcatttcctatgttttcatccttgccaacattctaaacatcaaatccacacaaggaagatcaaaagccttcagcacctgcagctctcacattatggcaatttctctgttttttgggtcaggggcattcatgtatcttaatcattctggatctatggaccagggaaaaatttcttctgttttctacactaatgtggttcccatgttcaaccctctgatctacagtttgaggaacaaagatgtgaaaatagcactgaagaaagttatgatgagagttcacagcagattcatatcctga

SEQ ID NO: 763 - DNA, 984 bp, Mus musculus
  MOR178-1
atgaactcagagaacttcacccggtccagagttatgcctgctgagttcattctcttggggatcacaaatcgttgggacatgcgtgtgaccctcttcctgatattcctgcccatctatctcgtcagcctgctgggaaatgtgggcatggtgctactcattcgtatagatgccaggctccacacacccatgtacttcttcctggccaacctctccctgctggatgccttctattcctctgccattggccccaagatgctggttgacctcctactgtcccgtgccaccatcccttatgtagcctgtgccctccagatgtttgtctttgccgggttggccgatgctgagtgctgcctgttagcagtcatggcctatgatcgctatgtagccattgggaaccctcttctctataccacagttatgtcaccacgtctatgcctggcgctccttggggcatcaggcctgggtggagcagtgagtgcctttgtacatacaactttcacctttcgcctgagcttctgtggctccctggaagtcaacagcttcttctgcgatattcctccactgcttgccatctcctgcaacgacaccagtctcaatgaactccttctttttgctgtctgtggctttatccagacaaccacagtgttggctattgctgtgtcttatggattcatcgctgttgctgtgatccgcatgcagtcagctgagggccgtcggagggcagcttccacctgtggctctcacctcacagctgtgtccatcctatatgggacccttattttcatgtacctgcgtcccagctccagctatgccctggacacggacaagatggcatctgtgttctatactctcgtcatcccagctctcaacccactcatctacagtcttcgaaacaaggaagtcaaggaagccttccagcgcacttggcatcgattctgctgcccggggcggagcactcgtgactggccacaggaagctcactaa

SEQ ID NO: 764 - DNA, 957 bp, Mus musculus
  MOR231-18
atgggccagagcaacaatgtcacagaatttgtcctgctgggcttcactcaggatcctgctgggcaaaaagctttatttgttatgttttcactgatgtacattgcaacaatggtgggcaacctgctcatcgtagggacagtgattgccagcccctccttgggctccccaatgtacttcttccttgcctctctgtcactcatggatgctgtttattccactgccatctcacccaagttgattgtagacttgctccgtgagaaaaagaccatctccttcagagcttgcataagccagctctttatagagcatttgtttggtggggttgatattgtcattctcgtggcaatggcctatgatcgctatgtggccatctgtaagccactgcattatttgattatcatgaatcgacgggtatgtattcttttcttggtgatggcctgggtgggaggttttgtacattctttgtttcaagttcttgctgtatataatcttcctttctgcggtcccaatatcattgaccactttggctgtgacatatacccattattactacttgcatgtactgacacctacttccttggcctcactatcattgctaatggtggagccatgtgtattgtcatcttcatcttactcctactttcttatgcaataatcctaagatctctccagaatcacagtaaggaagggaggcgcaaagctctgtccacctgcatttcccatatcactgtggtttttctcttttttgttccctgtattttcatgtatgttagacctgtttctagttttcctattgataaatccatcactgtaatttataccattgtcactcccatgctgaatcctttaatatatactttgagaaattcagagatgaaaaattctatggaaaagctcctgcagaaaatgttaagtccaaatagaataaagctttcttcttgctgctcatatgactaa

SEQ ID NO: 765 - DNA, 966 bp, Mus musculus
  MOR267-14
atgggaaaccacaccacagtgaatatgtttcttctgtggggtttttccagcttcccagagctacacaatctactctttgttgtggttctcctctcccatgtgactattattctagcaaatgcattcatcatggtggccatcaagctcaatcacaaccttcacgcccccatgtactttttcctctttgccctgtccttttcagaaacatgcaccactatggtgatcctgccccgcctgttagtggacttgatatcaaagaacaaggccatctctctccctgagtgtgccactcagatgtttttcttctttggcttgggaggcaataactgctttatcttgtctgccatgtcctatgaccgttacactgccatccacaaccctctgcattatccaatcctgatgacccaaaagatctgccttcacctcatcgtggcctcgggtgtgcttggcttctcaatctctctgtgtattgtcatcacaatattcaacttgtctttttgcaactccaatatcattcagcactttttttgtgatattgaccctgtggtctccctggcctgtaatttaaccttttatcataaagtgattctctttgcactcactgcctttgtgttggtaggcagctttattttcatcatggtttcttatgtcttcattgtgacagtagttataaagatgccctctgccaagggaaggtataagaccttttcaacttgctcctcccatttcacagtggtgttcatacattatggatttgcttcttttgtctatctgagacccaagaacagctactcttttagagatgccacactgttggcagtgacatacaccattctgacacctctgctcaaccccatcatttatagtctaaggaacaaaggcatacagactgccttgaagaaagatataggcaacataatcaggtttttctccaaaatggtaaataaaaaagcccagaagatttga

SEQ ID NO: 766 - DNA, 978 bp, Mus musculus
  MOR261-9
atgtatgtggccaacagcagtagaatgaatgcattcatactcttgggactaactgacaacccagacctggaagcccccctgttcatcatattcaatctcatctatctcatcacactgattggaaacctgggcatgattgtgttgatctggttcgactcccatctccatacccccatgtatattttcctcagtcacctctccttggcagactgtgtttattcctctgctgtgactccaaaagtgatggttgggcttctcacaggggataaagttatctcctatggaggatgtgttgctcaaatgttcttctttgtgacttttgccagtgttgactgtttcctacttgctgttatggcttttgacaggcatgctgcagtgtgcaagcccttacattataccacaaatatgactaccagtgtgtgtgcttgcatggtgattgcctgttatgtgttcagtttagctgaatcttctgtctatactgggtttatctttgatctctccttctgccattctaatgtgattcatcactttttttgtgatatacctccaatcctaaatctttcctgctctgatatatatacaaatgagattgtactctttatcataacatccttcaatgtctttttttctctgatagttatcttgacctcctatgcatttatattcatcgctatcctgaggatgcattcagcagaaggacggaagaaggcctcctctacttgtgcatcccaccttactgctgtaactatattctatggaactataatcttcatgtacttacagcccagttctagtcattccatggacaatgaccaaatggcatctgttttctataccacagtagttcccatgttaaacccagttgtttatagcttaaggaataaagaagttcatagtgccttcaagaaagccattgagaagttgaagtctgctcaacaccaagttctaattagagatttatacagtttatgtaattaa

SEQ ID NO: 767 - DNA, 966 bp, Mus musculus
  MOR261-9
atggaggaaaatcagaccacagtcacagagttcatcctgctgggattctgtcttggcccgaggattcacctagttctttttctgcttttctctctcttctatactctcaccatactggggaatgggactatccttgcaatgatctgcctggactccagactccacactcccatgtacttcttcctgtcccacctggccattgtcgatatggcctatgcctgcaacacagtgccacagacactcataaacctcttggatgagaccaggcccatcacctttgcaggatgcatgacacagacttatctatttttgacatttgctatcaccgaatgtcttcttcttgtggtgatgtcctatgatcgatatgttgccatctgccacccgctacactacactgtcatcatgaactggagagtgtgtaccatcatggctgctgtttcctggatagtcagctttctcctgtctctggtccatttacttctcatcctgaggctccccttctgtggacctcatgaaatcaatcacttcttctgtgaaatcctgtctgtcctcaagctggcctgtgctgacacaacactcaatcaagttgtcatttttgcagcctgtgtgttcactttagtggggcccctgtgctttgtactagtctcctacacacgcatcctggtggcaatcctgaggattcagtcaggggagagacgcagaaaggccttctccacctgttcctcccacctctgtgtggtagggctcttctttggcagtgccattgtcatgtacatggcccccaagtcccagcacccagaggagcagcagaagatccttttcctgttttacagttttttcaaccccatgctgaaccccctgatctacagcctgaggaatgctgaagtcaagggtgccctccggagggcactgtgcaaagaaagtcattcttgtttggtgtggtgttcccaccacaagccttggtag

SEQ ID NO: 768 - DNA, 966 bp, Mus musculus
  MOR261-10
atggaggaaaatcagaccatggtcacagagttcgtcctgctgggattctgtcttggcccgaggattcacctagttctttttctgcttttctctctcttctatactctcaccatactggggaatgggactatccttgcaatgatctgcctggactccagactccacactcccatgtacttcttcctgtcccacctggccattgtcgatatggcctatgcctgcaacacagtgcctcagacactcataaacctcttggatgagaccaggcccatcacctttgctggatgcatgacacagacctttctcttcttggcttttgcccacactgaatgtgtgctccttgttgtgatgtcctatgaccggtatgtagctatctgccacccgctacactacactgtcatcatgaactggagagtgtgtaccattctggctgctgtttcctggatatttagctttctccttgctctggtccatttagttctcatcctgaggctgcccttctgtggacctcatgaaatcaatcacttcttctgtgaaatcctgtctgtcctcaagctggcctgtgctgacacaacactcaatcaggtcgttatctttgcagcttgtgtgttcatattagtggcccccctatgctttgtactagtctcctacacacgcatcctggtggccatcctgaggatccagtcaggggagggacgcagaaaggccttctctacctgttcctcccacctctgtgtggtagggctcttctttggcagtgccattgtcatgtacatggcccccaagtcccagcacccagaggagcagcagaaggttcttttcctgttttacagttttttcaaccccatgctgaaccccctaatctacagtctgaggaatgctgaggtgaagggcgccctcaagaggtcactgtgcaaagaaagtcattcctggttggtgtggtgttcggaccataaatcttggtag

SEQ ID NO: 769 - DNA, 969 bp, Mus musculus
  MOR159-3
atggctactaaaaacaggacagaagtgactgaatttgtgttgttgggattgtccagccagccagagatgcagccagttatttttggagttgtccttatcatgtacctgatggcagttttgggcaataccctactagtgcttgttgcttgctcagaccccaagcttcatacccccatgtacttccttctcagtcagctttccttgattgacatatctctaacaactatcattgttccccagatgctggtgcacacactttctgtaaacagaaccatttcctataactgctgcatgacacagctcttttcctttatgacagtgggcagtatggaagttcacttgcttggtgcaatggcatatgaccgctatgttgccatctgtgaccctttaagatattcttccattgtcagccatagcctctgtctgcgaataacattgacctcatgggtggtggtcagccttaacagtctcctgtacagtgtgttggtcactcgtttaaccttctgtggcaacaaggtcacccatttcttttgtgacatcactcctctactgaagctctcctgtactcgaccagtggtcaatgaaatgttaatcttcactgagggtgtagctgtggtggtaagccccattttctttatttttggctcctatgttcgcataggtattgttatagcccacatgcactcagttgctgccctgcagaaagctctgtccacttgtagctctcatgttcttgttgtgatgtttctgtttggttctttggttcacatgtacctcaagccatcatccagctacaatctagaacaagatcgccaggttgccatcttttacacactcatttctcccatgttaaatccactaatctacagcctcaggaaccaggaagttaaaggagctctatggaggctttttaggaaactatatctcaggcagtgtccagcttggatttcccacaacacatgccagtga

SEQ ID NO: 770 - DNA, 981 bp, Mus musculus
  MOR224-10
atgcctttgcttctcttctccagggctgcctgtgccatgagcatgaggaaccacacctctgtgacagagttcatcctgctgggaatttccaacactgaaggactagagagcatgctgtttgccttgttcctggtcttttatgtctttgccttgttgggaaacctgctcatcttcctcaccatcctggcttctcccaacctccacacccccatgtatttcttcctggggaacctggcagtgtttgacatattcttcccttctgtgaattctcctaagatgatggactacctagtacggcaaggccgaaccatctcataccagggttgtgcctcacagattttcttctatcacaccctgggctgtactgagtgcttcctgtatacagtgatggcttatgaccgctttgtggctatttgttaccctatgagatatacggtcatcatgaaccccagggtgtgtacctgctttacagtgggcacttggctggggggctttgtccatgggagcatcctcacatttcttatctttaagttaccctactgtggccccaatgaggtagacagtttcttctgtgacattcctgtggtgctgtccctggcatgtgcagacacctccctagcgcagactgtgagttttactaatgttggcgttgttgcgctcacatgttttctccttgttctcacttcttacactcgtattgttatctccatcctgaaaatccgttcctcagaaggaaggcgcagagccttctcgacctgcagtgcccacttcacatccattctgttgttctatggtcccgtgattctcgtgtatctcagacctgcttctagtccctggctggattctgttgtccaggtgtttaataatgttgtcaccccttccttgaatcctctgatttattctttgagaaacaaggaagtgaaattagccctgagaaagatgttaagtcaagcaatgcaacctttggggtataaggaatag

SEQ ID NO: 771 - DNA, 969 bp, Mus musculus
  MOR179-6
atggaaaagatcacatcagctgtggatgtccacaatattccattaaagaacatgactgaagccaccatgtttattctcttaggattcacagatgactttgaactccaagtcttcctgtttttactgtttcttgctatttatctcttcactctggtaggaaactttggactggttgttttggtcattggtgattgtcggctacacaaccccatgtactatttcctaagtgttttgtctttcctggatgcttgctattctacagttgttacacccaaaatgttggtcaactttctaagtgaaaataagtccatttcattccttgcatgtgcaacccaaatgcttctctttgtttcgttgggaaccacagaatgctttctcctggcagcaatggcttatgaccgatatgtagccatctacaacccacttctgtatacagtggccatgtcacccagagtatacctgccactcatcattgcttcctatgctggtggagttgtgcatggtgctatccacacagtggccactttcagtctgtccttctgtggatccaatgaaattaagcatgtcttctgtgacatccctgcattgcttgctctttcttgttctgatacccacacaaatgagcttctagtcttgtacttggtgggcttgattgagattgttaccatcctgattgttctggtctcctatggattcatcctctttgccattctgaacatgcattctgctgagggtaggaggaaagtgttctctacatgtggctctcacctcactggagtctctatttaccatggtacaatccttttcacttatatgaggcctagttccagttatgcttcaaatcatgacatggtagtgtcaatattttacaccattgtgatacccatgttgaatcctatcatctatagtttgaggaacaaagatgtaaaagtagcatttaataaattgtggagaaaatgtgattcataa

SEQ ID NO: 772 - DNA, 993 bp, Mus musculus
  MOR179-7
atgtcgatacattcaccaggttacactgtacgaagaattccagtgaacaatgtgacagacaccaccatgtttatactaacaggcttcactgatgacgctgacctgcaagtcttgttatttcttctgttttttgtgatttatctttttactctcataggcaacttaggacttgttttgcttgtcattggagattcccggcttcacaatccaatgtattattttttaagtgttttatcattcctagatgcctgttattccaccgttgtcactccgaagatgttggtcaattttatttcaaatgataaatctatttcataccctggttgtgtaacagagatgtttctctttgttacgtttggaaccacagaatgcttcctgttggcagcaatggcttatgatcgctttgtagctatctacaatccacttctgtatgcagtgaaaatgtcacctagagtctacatacctctcattatagcttgttattcaggtggaattatgcatgctactatacatacagtggctacctttagcctttctttctgtgcatccaatgagattaggcatgtcttctgtgatattcctccattgcttgctatttcttgttcaaacacaaatataaatcagcttctgctcttctattgtgtaggctccattgagatcatcaccatcctgattgtcctggtctcttatagtttcatactctttgcaattcttaagatgaattctgcagaagggaggagaaaaatattctctacatgtggttctcaccttacaggagtgtccatttatcatgggacaattcttttcatgtatgtgagacctagttccaactatgccttggaacatgacatgattgtgtccacattttataccattgtgattccaatgctgaatcctatcatctacagtctgagaaacaaagatgtaaaagaggcaatgaaaaagatttttgagagaaatttcttcatgaacaaagtgcattttaaattataa

SEQ ID NO: 773 - DNA, 993 bp, Mus musculus
  MOR204-37
atggctttcctagaggatgggaaccatactatagtgacagagttcattttattgggcttaactgatgacccagttctgagagacatcctcttcaccatcatcctgtgcatctatctggtgaccgtgtccgggaacctcagcaccatccttctcatcagagtctcttcccagcttcatcaccccatgtatttttttctcagccacttggcttctgttgacataggcatttcttcttctgtcacacccaatatgcttgctaacttcctagtaaaaccaaataccatttcctacattggatgttctatacagtttacctcagctgttttccttgcgacagttgagtgcttccttctggctgccatggcttatgatcgctttgtagcaatctgcaacccactgctttattccaccaaaatgtccagagaagcctgtatccagttggttgtaggatcttatatacagggtctccttaatgcttcctttttcactctttccttcttttccttgatcttctgtggaccaaatagaatcaatcacttttactgtgatttggctcctttggtggaactctcctgttctgatgtcactctcgctgttgttattacctcaatttctgctggctttatcacactgacaacagtgtttgttatagccatctcctattcctgtattttcatcactattatgaagatgcactccacagaaagtcgatacaaggccttctccacctgtacctcccacctcactgcagttactctgttctatggaactactatgttcatttatgtgatgcccaagtccagctactccactgaccagaacaaggtgttgtctgtattctacatggttgtgattcccatgttgaaccccctcatctacagcctgaggaataatgagattaagggggctctgaagagatatcttggtaagaaaatattttcttatggtaacctgttttgtaaaactcactataatgacactcaccaagtatga

SEQ ID NO: 774 - DNA, 981 bp, Mus musculus
  MOR246-5
atggagaggcttaaccattccagagtgccggaattcgtgttacttggactcactgattctcctgagcttcagatattcttctttgtggcattttccattttctacttaatgacaatgcttgggaattgcttaattctgttcactgtcctgtccacttcacatctccactcccccatgttcttccttctcagcaacctttctctgattgacatatgcctctcctcctttgcaacaccaaagatgatcatggacttctttgctcatcacaagaccatttcttttgagggatgcatttctcaaatctttcttttgcatcttttcactggaactgaaattgtactgctgatttccatgtcttttgacaggtatattgccatatgtaaacctctctactattcaacaattatgagccaaaaagtgtgtgttggacttgtgatagcatcttggatggtaggcttcctacacacaatgagtcaactagtttttatcctctatttacccttctgtggtccaaatgtggtagacagtttcttctgtgaccttcctttggtgatccaattggcttgtatagatacctatgttcttggtgtcttcatggtagcaaccagtggtgttattgctcttataagttttctgcttttgctcatctcctacattgtggtgcttgtcaccatcaggggccactcctcaattggatcatctaaggctctttccacctgcacatctcatttcacagtggtgctcatgttctttggaccatgcattctcatttatgtgtggcctttcacaaactttctgatggataaaattctttctgtcttctacaccatcttcaccccctttctgaatccacttatctatactttgagaaatcaagaagtgagaacagcagtgaagaagaaaataagtaaccaatatttctcttttggtaagataaatccacattatacagtgaaaggactggagcgatccagagagtaa

SEQ ID NO: 775 - DNA, 954 bp, Mus musculus
  MOR245-20
atgaatcagtctgtggtgtcagagtttgtattcctgggactcaccaattcttggaatattcaactattcctttttgtgttctcctccatattttatgtggcaagcatgatgggaaactcactgattgtgttcactgtggtttcagactcccacttacactctcctatgtactttttgttggctaacctctcttttattgacttgggtatttcttctgttacttctcccaagatgatttgtgacctgttcagaaagcataaagtcatctcttttagaggttgtgttactcaaatcttctttatccatgttattggtggtgtggaaatggttttgctcatagccatggcctttgacagatatgtggccatatgtaaacctctccattacctgaccattatgagcccaagggtgtgcatcttgttttcagtggcctcctgggtggttggctttatgcattctctggttcaactggctttcgtagtaaacttgccattctgtggaccaaatgtgttggacagcttctactgtgactttcccaggttcatcaaacttgcttgcacagatacatacaaattggaattactggtctcaatcaatagtggattcatgtctgtgggctccttcttcatactgatcatttcctatattgtcatcatttttactgttcagaagcactcttcaagtggctcctccaaggctctgtccacactttcagctcatgttactgtggtggtcttattctttggtcctgtgatgtttttctatacatggccttcttcttacacacacctggataagtttctggccatatttgatgcaattgtcacaccctttctgaacccagttatctatacattgaggaatcaagaaatgaaaatagcaatgatgagagtattcagtaagctaatgggttgtaggcaaatttttaaacacttgaattttgagcaaacttaa

SEQ ID NO: 776 - DNA, 911 bp, Mus musculus
  MOR10-3P
atggatcacttaccagttttcattctaacaggcatcccagggatgccagacaagagcctgtggatggtctttcccctggggtttctctacacactaactctcctgggaaatggcaccatcctagcagttgcgaggtagagcagagcctccatgagcctatgtactacttcctctgcatgttggctttgattgatattagtctttccatgtccaccttgccctctatgccccctgagattccctttgaggcgtgtgtggcacagatgttcttcatccatgtgtttgggttagtagattctggagtcttattatccattattgcttttgacagatttgtagctatccagaatccactgcattatgctttcatcctcactcatggtgttattggaaagattggactagttgtcttggaccgggcagtctgtgtggtcttcccagtgccctttcttataaaaaggctgcgcttctgtcatcccaatatcttatctcactcatactgtcttcaccaagatatgatgcgcctagcctgtgctagcacccgtgtcaacagcctctatggtctcatcattgtcatccttatattaggacttgatgctctcatcattcttttctcttacatactcatcctgaagacagtgctgggcatttcttcaagagctgagaggctcaaagccctcaacacctgcctctctcacatctgtactgtgcttctattttatattcctttcattggtgccaccatgatccacagatttgggaaacatttatcaccaattgtgcacatgcccatggccaatatctaccttctcctccccactttgctaaaccctattgtctacagtgtaaagaacaaacagataagaggttgagtcatgaaaatgttccagggaagaaagagtagagcctag

SEQ ID NO: 777 - DNA, 941 bp, Mus musculus
  MOR31-13
atgggtactgtaaaccatacggatattagtcacacagtcttccatttgctgggcatccccggcctagaggaccagcacatgtggtttccatccccttcttcatttcctatatcactgccctgcttgggaacagcctgctcatcttcatcatcctcacaaggcccagtctccatgaacccatgtacctctttctctgcatgctggcaggggcagacattgtgctctccacatccacagttccccaggccttgtccatcttctggtttcacgctggggagatctccctggatcgctgcatcactcagctcttcttcatccactccactttcatctctgagtctgggatcttgctggtgatggcgtttgaccgctacattgctatttgctacccgctgaggtacatcaccgttctcacaaaatccctgattgggaaaatcggagtgggcatctttctgagaagttatggtacaattttccctataatatttcttctgaaaagactaactttttgcagaactaacattcttccacatacagcttgtgagcatgctggcttgtccaaatatgcatgtaatgacctccaagtgcatatctggtatgggttttttgttttaatgtcaacagtaaatttagatgttgtgttaatatttgtttcctatgtgctgatcctccgtgccgtcttccacatgccttcccaggatgctcgccacaaagctctcaacacgtgcggctcccatgtctgcgtcatcatcctcttctacgggcctgggattttctcaacactcaaccatcagtttggatacaagatctcaactggtgttcatgtcctgcttgccaatgtctgcatcctggctccaccaatgttgaatcccatcatctatggggtcaagaccaaacaaatccgagaccaagtgactcatgttttgtttctgaaagtaata

SEQ ID NO: 778 - DNA, 937 bp, Mus musculus
  MOR103-12
atgaggggggagaacatcaccaaggtcagcaccttcatcctgctgggcttccccacagcccctgagctgcaatacctgctcttcctcctcttcctgctcgcctacctctttgtgctggtggagaacctgaccatcatcctcactgtctggagcagcgcctccctgcacagacccatgtactacttcctgggttccttgtctttcctagagatctggtatgtgtcagacatcatccccaaaatgctggatggcttcctcttgcagaggaaacgcatctctttcactggctgcatgactcagctctattttttcatctccctggtgtgtacagagtgtgtactcttggcttccatggcctatgaccgctatgtggccatctgccaccccctgcgctaccaagtcatcatgaccacagggctatgtgtccagcttgtggccttctcttttgcaagtgccttcacagtctctgtgattaaggtctactttatctccagtgccaccttctgtggttccaatgtcttgaaccacttcttctgtgacatctcccccatcctcaagctggcctgcactgacttctctactgcagagctggtggacttcatcctggccttcatcattctggtgttcccactcttggccaccattctttcctatggctacatcaccctggctgtgctgcgcatcccttcagccacaggccggtggagagccttctcccacctgtgcctcccacctcactgtggtcaccttcttctatgtggccatgctttttatatatgtgagaccccaggccattgatacccggagctccaacaagctcatctctgctgtgtacactgtcctcacgcccatcttaaaccccttgatttattgcctaaggaacaaagagtttaaggatgctgtgaaaaggaccctgggtttgggtcacactctatag

SEQ ID NO: 779 - DNA, 958 bp, Mus musculus
  MOR266-5
atggaggaaggaaatcagactgggatggtcctcttccacttccgccccttctccaaactccctgaggtgcagatgctgatctttgtgcttttcctcatgatgtacctggtcagcatcgggggaaacatgtccatcgtcctcaccatctggaccaatcggtgtctccacacccctatgtacttcttcctggccaacctggctagcctggagatcttctattcttctaccatagcccccctgactctggccagcatcctgtccacagagaggactgtggtttccttggcaggctgtggtgcccagatgttcttcttcatcttcctgggcagtgctgactgtattctgctggctgtcatggcctatgaccggtttgtggccatctgtcaccctctgcgatataccctcatcatgagctggcacttgtgtgtccagttggccctggggtccctgttgctgggtttcatcttggccatgcagttgactgtgctcatcttccaattgcctttctgtagcagtaaggaaatcagcttgttctactgtgatgtcctccctgtcatgagactggcatgtgcagacacccatgtccatgaggccactctgtttgtagtcagtgtcatcgtcctcaccatccctttcctcctcatcactctctcctatgtcttcattgtggatgccatcctgaagatccgctcagctgaggggaggcacaaagccttctctacctgttcttcccacctgaccggttgtcctcctgcagtatggatgcacaagtctcatctacttgtgtcccagctccagctactctcctgagaggggccaggtagtatctgtggtttacaccttcatcacccctgtgctgaatcctttgatctacagcatgaggaacagagaactcaaggatgctttgaggagagtgataatgaaattggttctgatccaaacacaagaagcactctag

SEQ ID NO: 780 - DNA, 941 bp, Mus musculus
  MOR135-15
atgacagaagagaaccaaactgtggtcacccagttcatcctcctgggcctgcccattcccccagagcaccagcacctgttctatgctctgttcctgtccatgtacctcaccactgtcctggggaacctcatcatcatcatcctcattcatctggactcccatctccacacacccatgtacttgttccttagcaatttgtccttctctgacctctgtttttcctctgtcacaatgcccaaattgctgcaggacatgcagagccaagttccatccatcccctatgcaggctgcctggcacaactatacttttacctgtattttgcagaccttgagagcttcctcctggtggccatggcctatgaccgctatgtggccatctgcttcccccttcattacatgagcatcatgagccccaggctctgtgtgagtctggtgctgctgtcctgggtgctgaccaccttccatgccatgttgcacaccctgcttgtggcaagattgtcattctgtgaggacaatgtgatcccccattttttctgtgacatatctcctttgctgaaactgtcctgctctgacacacacattaatgagttggtgatatttgtcatgggagggcttgttattgtcattccattcctactcatcgttgtgtcgtatgcacgagttgtcacctccattcttaaggtcccatctgttcgaggcatccacaggtcttctccacttgtggttctcacctgtctgtggtgtcactgttctatgggacaatcattggtctctatttatgcccaacagctaataacaccactgtgaaggagactgtcatggccatgatgtacacagtggtgactcccatgctgaaccccttcatctacagtctgaggaacagagacatgaaaggggccctggcaagagtcctttgtaagaagaaaattaccttctgtctg

SEQ ID NO: 781 - DNA, 818 bp, Mus musculus
  MOR165-9P
atggcttttgaaaatgcttctatggtaattgaattcattctcttggggataacagaccaacctgacctcaaaattccatttttcctactcttttttgtaggatacatgataactgtgttgggaaatttgaccttgatcattttaattgggctaaattctcacctccacacacccatgtactttctcttgtttaacttgtctttcattgatctctgttattcttctgtgattacacccaaaatgctgatgagctttatacaaaaaaagaatattatctcttatacagggtgtatgatccagttatacttcttttgcttttttgtcatttctgagtgttatgtgctgacctcaatggcctatgatcgctatgtggcaatctgcaatccactgttgtataatgttaccttgtcttctaaggtatgttgttatctgatgcttggttcgtatttcatgggattttctggtgccatgatacacactggatgtattctaagactgacattttgtgatggaaataccatcaaccactatttttgtgatctccttcctttgctgcaaatctcctgtaccagcacctatatcaatgagatagagctgttcattgtagcaggaaaagacataattgtacccactatcatcatctttatctcttatggcttcatcctcttcagtgttctcaaaataaaatccactgaaagcaggtctaaagctttcagcacctgcagttcccatatgcttgctgtttctctcttctttggatcaggtgcattcatgtatcttataccttccaactggaatgaaatatgaggacttatttc

SEQ ID NO: 782 - DNA, 948 bp, Mus musculus
  MOR267-9
gagaagcagcaggacaatgggacctggctggtgacagagttcctgctggtgggattctccaacctcccagaactgaggcccactctcttcatcttgttcctcctcacctacctggtcacactcagtggcaatgccaccatcatcaccatcatccaggtggatcgcactctccacacacctatgtaccgcttcctggccgtgctctccctctctgagacctgctacacactggtcaccatccccaatatgctggctcatctgctgatggagagccaggccatctccatcgcgggctgtcgggcccagatgttcttcttcctaggcttgggttgcagccattgtttcctccttaccctgatgggctatgacaggtatgtggccatctgccatcccttgcgctactctgtgatcatgagacccaccgtctgcctgtgtttgggagccttggttttctgctctggtttctcagtggccttgattgagacctgcatgatcttctcctcacccttctgtggcgcaggccatgtggagcacttcttctgtgacattgcgcctgtgctgaagctcagctgtgatgagagctcactcaagggacttggcatcttcttcctgagcatcctcgtggtgctggtctccttcctcttcattctcctctcctacgccttcattgtggctgccattgtgaggatcccttcggcctctggccggcgcaaagccttctctacctgcgcagcccacctcacggtggtcatcgtacattttggttgtgcctccatcatctacctgaggccggactctggggctaatccctcccaggaccgcctggtggcggtgttctacaccgtggtgacaccgctgctgaaccctgtggtttacaccctgaggaacaaggaggtgagggtagcgctgaggaaaaacctggcacggggctgtggagcatttaagtaa

SEQ ID NO: 783 - DNA, 927 bp, Mus musculus
  MOR115-2
attaaaaatcagactttgactgaattcattctgctggggctcacagacgctccagagcttcaagtctgtgttttcctatttctcctcctcacatacatactcagcgttctggggaacctgaccatcatcgtcctcacgctgctcgattcccacctccagacacccatgtacttcttcctcaggaacttctccttcctcgaaatctccttcacatccacgtttactcctcgagtgctcttcagcatctccacaggaatcaagaccatcagctttgctgggtgcttcactcagtacttcttcgccatcctctttggagccactgagttttacctcctgactgccatgtcctatgaccgctatgtggccatctgcaagcccctgcactacaccaccatcatgagcaacagggtctgcaccctgctggtcctctgctcttggatgagtgggttcctaatcatcttattcccgatcatcctgaccagccaattggatttctgtgcatccaatgtgctcaatcattattactgtgactatgggcccctcatagaaatagcttgttcagacacaaggctgctggaactctttgactttgtcttagcagtggtgaccttgattgtcactctggtgctggtgattttctcctacacacgcatcatcaggaccattctgaagatcccatctgcacagcagaggaagaaggcattttccacttgttcctcccacatggttgtcatctccctctcttatggaagctgcatcttcatgtacataaagccttcagccacagaaggggttgccttcaataaaggggtagccgtactcaataactcagttgcccctttactgaacccattcatatacactctaaggaataagcaggtgaagcaaagcttcaaggatatcactaggaagattgtaaatctccag

SEQ ID NO: 784 - DNA, 936 bp, Mus musculus
  MOR227-6P
gagacaatagccaattccaccctagtgactgagttcttcctggaggtttttgctgagatttgggagctcaggatcttaatcactgtgctgttcctgctggtgtatctgtgcagcctgttagggaaccttaccatcatcattgttactacagttgaccagaccctgaacacacccatgtacttcttcctcaggaatctgtccattttagacatgggctacatttctatcactgtccccagtacctgtatcaactctctcactaaccacaggaatatttctgtggctgggtgtgcagcacaaatcttttcgttcttattttgtgcatatgtagagattctatttctttccatcatggcccaagaccgctatgtggccatctgcaagcctctgctctatcctgtgatcatgaaccaccagttctgtgttcagatgacactggcttccctactcagctcccttgtcattgcaagtgtgcacactttcaaaactttccagctgtccttctgtcactctaatgtggtccctcagttcttctgtgatctgcccgctttgctgagactttcttgctctgacacctttagcaacaaactcctaatacttctgactgtcattggagtcagtggtagttgctttgtcttcattgccatatcatatattcacatattatcaactgtattgaagattcccgtcaaaggagagagagggaaagccttttctacctgtgttcctcacattattgtggtgtctgtctttgttagttctgctgcctttgtgtatctacgacctccagtaataacctttgaagtagttcaggaaatggttatttctgtattttataccatggttccaccattcttaaacccaattgtctatagtcttagaaacaaacagataaaggaggcagtgaggaaagttatattgcgagtttttcccata

SEQ ID NO: 785 - DNA, 960 bp, Mus musculus
  MOR262-11
atggaaattaacaaccagacctcgttccctgtgtccagcttcatcctcctgggcctctccgcccacccaaagctggagaaaaccttcttcatgctcatcctgctgatgtacctggtgatcctgctgggcaacggtatcctcatcctggtgagcatcctcgactcccacctgcacacgcccatgtacttcttcctggggaacctctccttcctggacatctgctacaccacctcctccgtccccctcattctggacagctttctgacccccaggaagaccatctccttctcaggctgtgccgtgcagatgtttctctccttcgccatgggagccacagagtgtgtgctcctgagtatgatggcgtttgatcgttatgtggccatctgcaacccccttagataccccgtggtcatgaacaaggctgcctatgtgcccatggctgtcagctcctggtcaggtggaattgctgtctctgtggttcaaacatctcttgcaatgaagctgaccttctgtggggacaatgtcatcaatcactttacatgtgagatcctggcagtcctgaaactggcctgtgctgacatctccatcaatgtcatcagcatgggggtgacaaatataatctttctgggggtcccggttctctttatttctttctcctatgtcttcatccttgtgacaatcctgaggatcccctctgctgaggggaggaagaaggccttctccacctgctctgcccacctcaccgtggtacttgtcttctatgggaccatcctgttcatgtatgggaagcccaagtccaaggacccactgggggcagacaagcaggaccttgcagactagctcatctccctcttctatggggtgctgactcccatgctgaaccccatcatctacagcctgaggaacaaggacgtgagggctgctgtgacgaacctggtggtccttaagaaaagcttcacc

SEQ ID NO: 786 - DNA, 943 bp, Mus musculus
  MOR264-7
atgaatcatgaagagctagagtccataaacaatgtttccacagtgatacagtttgtgctcataggattttctgacctgcccaacctccaaggatttctatttgcagtgttttctgtagtttatattattatcttgattggaaatttcctcataatcataataatcagtacggaccaagcattacagaaaccaatgtatttttttctggcaaatttttcctctctggaaatctgttatgtatcagtgactgtcccaaggattctgttcaacattgggacacagaaccgaagcatttcactgatgtcctgtgctacacaactgtgcttcttccttgtttttggaactactgaatgtttgttgctagctgtgatgtcctatgaccgatatgtggccatatgcaaccctctgcactatcctctggtcatgaacccaacaaagtgcacacagctggcagcagtctcctggcttggaggcatcccagtccagataggacaaacttgtcagatattctctatgaatttttgtaattcttacaaaatcaaccacttcttttgtgacataccaccaattctcacgctggcttgtggaaacacttcagtgcatgaattgtctgtctatgtggtcgttatggtggtggctgcattcccctttatattggtgcttacatcctacagcaaaatcattgccaccatccctgaggttgccaacagccaaaggtcggggaaaagccttctccacgtgttcttcccacctgctggtggtactattgttttatggatctgctacggttacctatttgagaccaaagtccatgcattctcctggaactgacaaactcctgtctctgttctacaccattgtgactcccatgttcaatcccttaatatacagccttaggaacaaggaagtgattgctgcactgagaaagttaatactaaaaaaa

SEQ ID NO: 787 - DNA, 934 bp, Mus musculus
  MOR256-32P
caggctaaccacagctcagcggagcgcttcctactgctgggtttcagcgactggccctctctgcagcctgtcctcttcgcactggtccttctctgctacctactaacgctcaccggcaacgcggcgttggtgctgctggccattcgcgaccctcgcctgcacacacccatgtactacttcctttgccacttggctctggtggatgtgggtttcaccactagtgtggtgccaccgctgctggccagcctgcgcggctcaatgctgcagctaccgcgcgctgggtgcatggctcagctgtgctcatcgctggcgctgggctccgccgagtgcgtgctgctggccgtcatggcgctggaccgcgcggctgcggtatgcaaccctctgcgctacacctcactggcctcgccgctactgtgccgcacgctggcccggagtctcctggctcggtggcctggccaactccgcggcgcagaccgccctgctggccgcgcgtcccctgtgcgcaccccgctgtctggaccatttcatctgcgagttgccggcgctgctgcagctggcctgccgcggcggccgcagcgccaccgagcgccagatgttcgccgcgcgtgtggtcatcctgttggtgccttcggcggtcatcctggcctcctacatcgccgtgggccgcgcggtctggggcatgcactccagctctggctggcggaaagcggcgagcacatgtggctctcacttgaccgcggtctgcctattttatggctctgccacctacacctacctgcaacccacgcatagttacaaccagggccgtggcaaattcgtctcgctcttctacacggtggtcactcccgctctcaatcctctcatctacacactgaggaacaaggaagtgaagggggcggcactgaggctcttgcggagtctggggaggccatag

SEQ ID NO: 788 - DNA, 925 bp, Mus musculus
  MOR250-4
atgtctaatcaaacctcagtcactgaatttctcctcctgggagtaacagatatacaagaattaaaccctattctctttgtggttttcttcacaatctactttgtcaatataactgggaatggagccatcctgatgattgtcatcttggacccaagactccactcacctatgtatttcttcctgggaaacctagcatgtctagatatctgcttctccactgtgacactgccaaagatgctgcagaacctcctctccacaagcaaagcaatttccttcttgggatgcataactcagctccatttcttccacttcctgggtagcactgaggccatgctgctgccagtgatggcatttgaccgctttgtggctatctgcagaccactccactattctgtgatcatgaatcaccagctctgtattcacatgactgttactatctggaccctgggctttttccatgccttacttcactctgtaatgacatctcgtttgagcttctgtggtcccaatcatgtccatcatttcttctgtgatattaagccattgttggatctggcctgtggaaacactgagctcaacctttggctgctcaatacagtcacaggcaccattgccctcactccctttttttctgacatttctctcctatttctacatcatcacctatcttttcctcaagactcgttcttgcagcatgctccacaaagctctgtctacctgtgcctcccacttcatggttgtgattctgctctatgttccagttctcttcacctacatccgtcctgcctcaggcagctctctggatcaggacagaatcattgccatcatgtacagtgtggtcacccctgctctcaatccactcatctacaccttgagaaacaaggaagtgaggagtgcattgaatagaaaggtgagaagatggctc

SEQ ID NO: 789 - DNA, 946 bp, Mus musculus
  MOR211-3P
ctgtctgtcatttgccaaatccttgcccatctgcaactagagactcattcaatgcagacaaagggatccacagggtctgtggcattctatattattaccattttgggaaacttgggcatgatcattcttatacaggtggatatacagctccacactccaatgtatttcttactgcgccatctccctctattggatggtcacatccatctccctctacacctcggtcatcacccctcagataatggcaacactggccaaaaacaaaatgaccatctcctgtggccgatgtgcaacacaattcttctccttcaccatctgtgcagttactgagtgtttccttctgtctgtgatggcctatgatcgctatgttgctattagcaactcacagctctatactgtaatcatgagtcctaaaaaatgctggagtttggtggctgtagcctatgttggtgggttgtttggggtcatcttaagaaccacatgcaccttctccctcttcttctgtgaagataatcaaatcaatttcttcttttctgatctcccaccactgctgaagctggcctgcagtgatacaattaatattgagattatagttgtctgttttgggaactttgtcattttggccaatgccttggtcatactcatttccaacatgttcatcatcaaggctgtcataaagctgaagtcttcaggtagcagaggtaaaacattctccacatgtacctcccacctcactgctgtgggtcttttgtttgggattctcatctttatctacatacagagaagctcaggcaaatccctagaggaagacaaggtggtatctgtcttcaacactgtgatcattcccatgttgaaccctcttatctataccctgagaaacaaggatgtgaaggctgccttcagaaaggttactggtagattccaggtgtctcaaactttacaaaat

SEQ ID NO: 790 - DNA, 832 bp, Mus musculus
  MOR245-14P
atgccaaattttacagatgtaaccgaattccttcttgttggattgacaaggcgtcaggaactccgggttctcttttttgtggtgttcttggttgtttacatggtcactctgttgggcaacattggtatgataattttgatcagcatcagcctgcagcttcagagtcctatgtattttttcctaagtcatttgtcctttgtggatgtgttgttctcctcaaatgttacccccaaaatgctggaaaacttaatatcagaaacaaaaacaatttcttatgttggatgcttggtacagtgctactttttcattgctctggtgcacgtggaggtctatattctggcagtgatggcctttgatcgctacatggccatctgcaaccctttgttgtacagcagcaagatgtccagggttgtctgtatccgcctcatttctgtgccttatgtctatggattctctgtgagtctgatttgcactctgtggacatatggtttatatttctgtggaaacattaaaatcaaccacttctattgtgctgatcctcctctcatcaagattgcctgtggaggagtgcatatcaaagagtacacaatgattgtcattgctggcattaacttcacgtattccttgtcagtggttctcatttcatatgtgctcattgtagtagctgtgttacgcatgcactcagctgatggcaggagaaaggcattctctacctgtggatcccacttaacagctgtatccatgttttatggaaccctcatattcatgtatctgagaaggccaacggaggagttctgtggagcagggaaagatggtggctgtcttttatacc

SEQ ID NO: 791 - DNA, 936 bp, Mus musculus
  MOR204-23
tcctgggaggatggaaaccacactgcattgacagagttcattttattgggattaacagatgagccggtccttagagttgttctctttaccatcatcctgtgcatctacctggtgactgtgtctgggaacctcagcaccatccttctcatcagagtctcttcccagctccatcatcccatgtacttttttctcagccacttggcttctgctgacataggatactcatcttctgtcacacccaatatgcttgtcaactttttggtggagaaaaataccattacatacctaagatgtggcatccagcttggctcaagtgctttctttggaacagttgagtgctttgttctaactgccatggcttatgatcgctttgtggcaatctgtagcccactactctattcaaccaaaatgtctatacaagtctgtatccagttgcttgtagtagcatacataagtggttttcttaatgcatcctccttcaccctttcgttctttacttttttcttctgtggaccaaacataatcaatcactttttctgtgattttacccctctagttgaactctcttgttctgatgacagagtctctatcattcttgccactatatctgttggcactgtcatttttatcacagtgcttatcattgttgtctcctacatatacatcctcatcaccatcctgaagatgcactccactgagggccgccacaaagccttctccacctgcacctcccacctcacagcagtcactctgttctatggaactgtcacattcatttatgtgatgcccaagtcaaattactctacagaccagaacaaggtggtgtctgtgttctacatggtggtgatccccatgttgaaccccctcatctacagcctgaggaataatgagattaagggtgctctgaagagacaacttggtagaaaaatattttca

SEQ ID NO: 792 - DNA, 947 bp, Mus musculus
  MOR259-2
atgtggatgattccagggcagaaccaaagttgggtttctgagttcatcttgattggcttctccagtgaccccacaaccaacagcatcctcttcattgtcttccttctcatctacctgagctcagtcctgggcaacgggctcatcatcatgctggtctgcctggacacacagctgcacactcccatgtacttcttcctctgtaccctctccctgttggatatgagctttgtcactaccactgtgccccagatgttggtgcatcttcttgctcactctcagaccatctcctttgctggctgctggctgcagatgtttgtgttcggtgccctgggtatgactgagtgcaccttctttgttgtcatggcttatgatcggtatgtggccatttgctatccattgcgctatactgtcatcctcaactggggcctgtgcatgcggttggcagcagggacttggatctctggtttcttttcctctttattgcatactttctttaccatgagtctgccatattgtgggcccaacagggtcaaccactacttttgtgaaggtccttcagtgcgtagcctggcttgcatggatacccacatcattgagatggtggactctgtcttgattgtcattttggttattgttccaatttcccttattgtggcctcctacattcgtattgtcatggcaattctcaagatcaagtccacccaggggcgctgcaaggctttctctacctgtgcctcccacctgactgtggttacactcttctacgtccctgccagctacatctaccttagacccaactccagctttcccctgagcgagacaagcaggtctcactcttttacaatgtcttcacagccttgctcaaccctgtggtctacagtctgaggaacaaggacatcaagagggcatttctcaaggtgatgggacatgctagggtagattcatga

SEQ ID NO: 793 - DNA, 1351 bp, Mus musculus
  MOR8-4P
atgtcagtcttcaacgcctccaatatagaaatccccaccttcgttctgattgggatcccagggttggagcatgtgcatatttggctctccatcccaatttgtctcatgtaccttgtggccatcatgggaaactgcaccattctcttcctcataaagacagagacctctctgcacgagcctatgtattatttcctctcaatgctggcattttctgatttaggactgtccgtttcttcccttccaaccgtgctgagaatattcttattcaactccacagagatttcttcagatgcctgttttgctcaagagtttttcattcatggattctcagctatggagtcttcagtgcttttcatcatggccatcgaccgtttcatagctgtctacaaccctttgagatatacctccatccttacagtcagaagggtctttaaaactggcctaatatttgctacattctgcattgcagttgttctgccatttccctttatactaaagaggttaaagttctgtaagaaaagtctcttatctcattcttactgccttcaccaggatgttatgaaggtagcttgttccaacaacagaatcaacgtaatctatggattttttgtggctacttcatctctgttatacttggtgttcatttctgtgtcttacatgctgatccttaaaattgtcctgggctgtgaggagccgccctcacatttgccattataagatggcactgacagctgtgttctaagtggtaaacataatctgcacacgtgcaggggcagttttcccgccatgtgttctgcctttcccgtgatgacaactgggccgatgggctgcagccaatcagggagtaatacgtcctaggcggaggataattctccttaaaagggacgggttttgccactctctctcttgctttcttgttcttgctctttttcttgctttcttgctctctcttgcttttttgttcttgttctttttctctctcttgcactcttgctctcttgctctctggctcctgaagatgtaagcaataaagcttttgccgcagaagattccggtttgctgcgttcttcctggctggtcgtgaacgcgggtaagactgggcattacttcccataagggtcgcctcaagttctttaacacttgcatctctcatatctgtgctgtgctcatcttctatgtgcctatcatcaccttggcagcccttcaccgttttgctaaaaacatttcgccagtcattggagtcataatagctgatatcttccttctggttccacctctaatgaatcctattgtatattctgtgaagagtcagcatattagaaatctgatccaaaccaaattttgtgaaaaa

SEQ ID NO: 794 - DNA, 978 bp, Mus musculus
  MOR31-14
atggctttcttacctgcttccggtgtggctgctgtgaacagctctgacactcgcgtgacaggctgcctcctcaccggcatccctgggctggagcacctacaaatgtggctgtccatccccttctgtattatgtacatagctgccctggtaggcaatagcgttctcgtctgtgtcatcctttcccagtcaagcctccatgagactatgtacatattcctgtctatgctggccagtgctgatgtcctgctctctacctccaccatgcccaagaccctggccaacttctggctaggttctagccacatctcctttgacggctgcctgacgcagatgttcttcattcacttcctcttcgtggctgactctgctgtcctgctggccatggcttttgactgctatgtggcaatatgctctcctctgcgctacaccaccatcctaacaaggcaggtcatgggaaagatggctgctgctatcctgacacgcagttttataatcatgctcccatgtatctttctcctaaagcggctgcactactgccgaatcaatgtcattgagcacacattttgtgagcatatgggtatcgcccggctgtcctgttctgacatttccattaatgtctggtatgggctgacagctgctcttctctctacaggcctggacatcatcctcatcgctgtttcctatgttcacatcctctgagcggtattccgcctctcttcccaagaagcccggtccaaagccctaagcacttgtggatcccacgtctgtgtcatcctgctgttctatatcccagccctcttctctgtctttgcctacaggtttggtgggaaacacatcccacgctatgtccatatcctgctggccaacctctatgtggtcatcccgcctatgcttaatcctgtgatttatggagtaagaacaaagcagatactggaaggagctaagcaaatgtttacaaatatcaccaaggaatttaag

SEQ ID NO: 795 - DNA, 926 bp, Mus musculus
  variation (265)...(284): Any nucleotide A, C, G or T
  MOR40-5
atgggtactgccctgcatgaaaccaacagctcagaggtccacgtgtctgagttcattctgctgggattcccaggcattcatgaattccagatctggctgtccttgcctatggctctgctttacattgtagctcttggtgctaatctccttatcttgatcaccatctaccttgagcctaccctgcatcagccaatgtatcagtttcttgggatcttggctgcagtagatattggcttggctaccaccagcatgcccaaaatacggnnnnnnnnnnnnnnnnnnnntatgctatccacacttttatgtgcatggagtcaggcgtcttcctatgcatggcaatagatagatatgtagccatttgttatcccctccagtatccttccatagtcactgaagcttttgtaatcaaggccacactgtccatgctgctcaggaatggcctgttaaccatcccagtgcctgtactagctgcccagagacaatactgctccaggaatgaaatagatcactgcctttgctctaacttgggggtcattagtctggcctgtgatgatatcactgttaacagattctaccagttggcattggcctggcttgtggtaggaagtgacatgattctggtctatgcttcttacgctttgattattcgctcagtgctgaggctgaactccactgaggcagcatctaaggccctcagcacctgcagctcccacctcatcctcattatgttttactacacagctattgttatagtatctgttactcacctagcaggaagaagggttcccctcatccctgttctcctcaatgtgatgcatattgtcatccctccatcccttaaccccgtggtatatgcccttaggacacaggagctgaaagtgggcttccggaaggtttttagcctgagtgagtttgtgtctaggaag

SEQ ID NO: 796 - DNA, 902 bp, Mus musculus
  MOR135-16P
atgataaagaacaaccaaactgtcatctcccagtttctcctccttgccctgcccatccccccacaacaccagcaactgttctatgccctgttcttggccaagttcctcaccacagtcctggggaacctcatcatcatcatcctcattctaactcccatctccacacacccatgtacttgtttctcagcaccttgtcattctctgatctttgcttttcctctgtcacaatgcccaagttgctgcagaacatgcaaagccaggacacatccatcacctatgccgggtgcctgacacaaatgtactttttcatggtttttgcaaacatggagaatgttcttcttgtggtcatggcctatgaccgctatgtggccatctgcttccctattcattacaccagcatcatgagccctaagcactgtgtgtctctggtagtgctctcctgggtatttaccattctgtattccatgttacacaccctactcttggcaagattgtcattctgtgaggacaatgtgatcccccactttttctgtgacctatctgccctgctcaagttggcctgctctgacatttacattaatgaagtaatgatatttatcttcgaagggcttgatactgtaatcccattcttactcatttttgtttcctgtgtacaaattgtctgctccattctaaagttttcaactacatggggcatagccaagatcttttctacctgtggctcccacctgtctgtggtctcactgttctatgggacaattattggtctctacttttgcccataaactaataactctactgtgaaggacactgccatggctatgatgtacacagtggtgactcccatgctgaatcccttcatctacagcctgatgaacaaagatatgaaagaggccctgatt

SEQ ID NO: 797 - DNA, 929 bp, Mus musculus
  MOR135-17
atgaacaaccagactgtcatctctcagtttctcctcctgggactgcccattcccctggagtacaagcacctgttctttgccctcttcctgaccatgtacctcaacatcatcctggggaacctcattatcatcatccttattctactggacacacatctccacacacccatgtacttttttctcagcaacttgtccttctctgatctctgcttttcctctgtcacaatgcccaagttgctgcagaacatgcagagccaggacccatccatcccctatgccagctgtctgacacaaatgtactttttcatggcttttgggaacatggaaatttatcttcttgtggtcatggcctatgaccgctatgtggccatctgcttccctcttcattacaccagcatcatgagccctaagctctgtgtgtctctggtggttctctcttgggtatttaccattctgtattccatgttacacaccctactcttggcaagattgtcattctgtgaggacaatgtgatcccccactttttctgtgacatatctgccctgctcaagttggcctgctctgacatttctattaatgaactaatgatatttatcgtgggagggcttgatactgtaatcccatttttactcattgttgtttcctatgtacaaatgtctgctccattctaaagttctcatctacacggggcatacacaaggtcttctccacctgtggctcccacctgtctgtggtctcactgttctatgggacaattattggtgtctacatatgcccatcagctaataactctactgtgaaggagactgtcatgtccctgatgtacacagtggtgacgcccatgctgaatcccttcatctacagtctgagaaacagagatatgaaagaggccctaatcagagtcctttgtaagaagcaaatctcgtta

SEQ ID NO: 798 - DNA, 934 bp, Mus musculus
  MOR135-18
atgcctggaaaaaaccagactatcatctctgagttcctcctcctgggcctgcccattcccccagagcaacagcacctgttctatgctctgttcctggccatgtacctcaccactgtcctggggaacctcatcatcatcatcctcattcgactggactcccatctccacacacccatgtacttgtttctcagcaacttgtcattctctgatctctgcttttcctctgtcacaatgcccaagttgctgctgaacatgcagagtcaaattccatctatctcttatgcaagctgcctggcacaaatgtacttttttctttttttttggagcccttgagaacttcctacttgtggttatggcctatgaccgctatgtggccatctgtttccctcttcattacaccagcatcatgagccccaggctctgtgtgagtatggtggtgatgtgctgggtgctgaccaccttcgatgccatgctgcacaccctgctcatggccagattgtcattctgtgaggacaatgtgatcccccactttttctgtgacatgtctgctctgctcaagctgtcctgctctgacacccatgttaatgaggtggtgatatttatcataggagggcttggtgtcgtacttccatttctactcatcacagtgtcttatgcacgcataatctcctccattctcaaggtcccttcaactcaaggcatccaaaaggtcttctccacttgtggttctcatctgtctgtggtgtcactgttctatggaacaattattggcctctacttaggtccatctgcttattactctactctaaaggacactgtcatgtctatgatgtacactgtggtgactcccatgctgaaccccttcatctacagcctaaggaacagagatatgaagggagccctaaaaagattatttcaaaagaaaactatcttc

SEQ ID NO: 799 - DNA, 936 bp, Mus musculus
  MOR135-19
atgcctagaaacaacaaccagactaccatctctcagttcctcctcctgggtctgcccatcccccaagagtttcagcatctgttctatgccctgttcctggccatgtacctcaccactgtcttggggaacctcatcatcatcatactcattcgactggactcccatctccacacacccatgtacttgtttctcagcaacttgtccttcactgacctctaattttcctctgtcacaatgcccaagttgctgcagaacatgcagagccaagttccttcaatcccctatgcaggctgcctgacacaaatgtacttctttttgttttttggagatcttgagagcttcctccttgtggccatggcctatgaccgctatgtagccatctgcttccctcttcattacaccagcatcatgagccccaggctctgtgtgagtcttgtgctgctgtcctggttgctgaccatgtcccattccatgctgcacactttgctcttaactaggttgtctttctgtgaaaacaatgtgatcccccattttttctgtgatctgtctgctctgctgaagctggcctgctctgatattcacattaatgaattggtgatattgatcataggagggcttgttgttatacttccatttctactcatcacagtgtcttatgcacgcatcatctcctccattctcaaggtcccttcaactcaaggcatccacaaggtcttctccacttgtggttctcacctgtctgtggtgtcactgttctatgggacaattattggcctctacttatgtccatctgctaataactctactctaaaggacactgtcatgtctatgatgtacaccgtggtaactcccatgctgaaccccttcatctacagcctgaggaacagagacatgaaggaagccctaaaaagagtgcttcaaaagaaaactatcttt

SEQ ID NO: 800 - DNA, 955 bp, Mus musculus
  MOR257-5P
atggaacaagacaaccagacatgggtgcatgaattcatccttcttggcctttccaatgactggggcactcaagtctcccttcttcgtcctgttcttgctgatgtacctggtgacagtattggggaacttcctcattcattgtttctgatcagactggacagcagactccacactcccatgtatttctttctcaccaacctgtccctggtggatgcatcttatgccacaagcatagtcccccagctgctggctcatttccttgccacacacaaagcaattccatttctgagctgtgcagcccagttatttttttcccctgggcttgggtgggatcgagttccttctgctggcagtgatggcctatgaccgctatgtggcagtgtgtgatcctctgaggtattcagtcatcatgcatacagggctctgcacaaggctggtcatcacatcgtgggtcagtggctccatcaattctcttgtgcacactgccatcaccttccagctgcccatgtgcacaaataagtatattgatcacatttcctgtgaaattctagctgtggtccgattggcctgtgtggacatttcatccaatgagattgtgatcatggtttctagcattgtcttgcttatgacacctttctttctggttcttttgtcctacattcaaatcatctccaccattctgaaaatccagtctacagagggaaggaggaaggccttccacacctgtgcctcccacctcactgtggtaacattatgctatggtaccaccatttttacctacatccagccccactccagcccctcagtccttcaagagaagttgatttcccttttttatgctgtattgatgcccatgctgaatcctatgatttatagtctaaggaataaggaggtgaaaggggcttggcagaaactattaggaaaattctctgtgttcacatcaaaactgacaagt

SEQ ID NO: 801 - DNA, 930 bp, Mus musculus
  MOR236-1
atggaaataccacacaatattacagagttttttatgctgggactttctcagaggccagagatccagagacttctctttgtggtcttcttggttatctatgcagtcacagtttgtggcaacatgctcattgtggtcactgtcaccttcagctccagcctggcttctcccatgtatttcttcctttccaatctatcctttattgacacctgctattcctcttctttggcgcctaaacttattgctgattcccttgtatgaagggacgacttcttttcttatgagggctgcatggcccagctctttggagctcatttcctgggaggtgttgagatcattctgctcacagtgatggcctatgaccgctatgtggccatctgcaaacccctgcactataccaccaccatgaccaggcacctttgtgtcgtgctggtggcggtggcttggctgggtggtttcctgcattcgttggttcagatccttctgatttttcagttgcctttctgtggacccaatgtaataaaccactttgtgtgtgacttgtatcctttactggagctggcctgcaccaacacatacgtcatcggcctgctggtggtggccaacagtggtgtgatttgcctgctgaacttcctcatgttggctgcctcgtacattgtcatcttgcactctttgcggtcccacagtgcagaggggagacggaaagctctgtctacctgtggggctcacttcactgtggttactatgttctttgtgccctgtatatttagttatatgcgtccatcgactactttacctatagataaaaacatggcagtgttttatggtattctcacacccatgttgaatccactcatttatactctgagaaatgaagaagtgaaagatgccatgagaaagctcttcacacgctcagaagttgtaggtgcctga

SEQ ID NO: 802 - DNA, 833 bp, Mus musculus
  MOR227-7P
acagtgttgggcaatggcctcattgttgtgacagtcaacatcaagtaagagtctgtattcccccccatgtatttcttccctccaattacttgtcccttggtggagatcctcctactccttctactgttgtccctaagttcatcactgatttacttaacaagattaaaaccatctctccaaagggctgcctagctcagattttcttcttccacttctttggggtcactgagattctcttgcttacagtgatggcttatgaccgctatgtggccatctgcaaacctctttactacacaactatcatgagtaggcccaaatgtcaccggctggtggctggttcttgggtggggggattttttcattctataattcagattttcatcactctccctttgcctttctgtggtcccaatgtgattgaccattacttctgtgacctccatcccttattcaagttggcctgcactgacacttttgtggtgggggttattatgtttgttaacagtggattattttctgtattttcctttcttttcttggtgtcctcttacattgttatcctgtataacttgaggaaccattctgcagaggggagacgcaaggctttatctacctgtgcctctcacatcatggtggttgtcttgttctttggacctgccatcttcctctacttgagacctgcctccacctacactgaagacaagcttgtggctgtgttctacacggtcatcacccctatgctgaatcccatcatctacacactcagaaatgcagaggtgaaaaatgctgtgaggaagttgtggggcaaaaaagtgagctcaagtttggaataa

SEQ ID NO: 803 - DNA, 927 bp, Mus musculus
  MOR228-1
atggctgacatacacaatgtgactgagttcctttttctgggactctctcccaatcaagaggtgcagagagtttgctttgtgctatttctgctcttgtacatggccattgtgcttgggaatcttctcatggtggtcactgtggtagccagcagaaatcttggatccccaatgtacttctttcttgactctctctcctttgtggagatctgatactcctccatgacagccacaaaactcatcttggatctcctaactgaaaagaaatccatatctgtatggggctgcatgatacagcttttctttatccacttcgttggtgctgctgagattttcctgctcacaatgatggcctatgactgctatgtggccatctgcaagcccctgcactacaccagcatcatgaaccaaagtgtgtgtgcagtcctcctgggaacagcatggatgggaggctttgtgcattgtcttgcccagatccttctccttcttcctttgcccttctgtggccccaatgtcattgaccattatttctgtgatgtgttccctgtgcttaaacttgcctgctcagacaccttcctcattgggctgctgattgttgccaatgggggaactctgtctgtgatcagctttgtggtcctcttagcatcgtatgtggtcatctttttctatctgagaacccagagtgctgagggatggcgcaaaactttggccacctgtgggtgccatgtcactgtggttatattgttctttggtccatgtgtcttcatctatttgaggccttctgataccctacctgtagacaagatgatagctgtgttctacacagtgataactcccctgctcaatcctctcatctactccctgagaaatgcagaagtgaagaaaaccatgaagtgtctatggttcaggacaatgaaagtagatgagaaa

SEQ ID NO: 804 - DNA, 922 bp, Mus musculus
  MOR225-6P
atgaactataggacaaatatcacagaatttattctcctagggttttctcagacaaaagaaatagaagttatctgctttgtattatttttactttgttacattgcaattttatttgggaacctacttatcatgatttctgtcacatggagtcacctcatcaatcagcctatgtatttctttctgagttaccttgcactttcagatttgtgttacacctccacggtgacacccaagctgattatcaacttagtcacaacaaaaaagtcgatttcctacaatggttgcatgacgcagctcttcactatgcacttactttggtggcattgaggtctttatccttacaggaatggcttatgaccgctatgtggccatctgcaagcccttgcactacaccatccttatgagcaggcagaagtgtgatgctgtgattgcagcttcctgtgctgggggatttctgcattcctttggtcaatttatcctggcagtcttcttaccctactgtggccccaatgaaatagatcactacttctgtgatgtgtaccctctgcttaaactggcctgtactgacaccagaaaaattggtttcttggtcattgctaactctggcctaatgggcttagtgacttttgtggtcttgttgatatcatatggtgtgatcttatacactgtcaggtcttactctgcagagaatcgtcgcaaagctctttccacatgcagttcacacatcactgtggtagtccttttctttgctcctctattgtttatttacattcgaccagcaactacattaccagaagacaaagtatttgctctcttttatactatcattgcccccatgctcaaccccctgatttatacactcagaaacaaggagatgaagaatgccatcaagagactatgttaccttatgtcagggagtgaa

SEQ ID NO: 805 - DNA, 921 bp, Mus musculus
  MOR129-4P
aaagacacggacagtcccaatcagacagctacagaatttctcctcctgggattctctggaaaatcagagcaagaagaagtcgtctttggaatgttcttaggcatgtacttggtcaccatctctgggaaccttctcatcatcctggccatcagctgtgaccctcatctccacacacccatgtacttcttcttggccaacctctccagtgtcgacattagtgctccatctgtcattgtccccaaggctggtgaactacatgttgggaatcaagaccatctcttacacagagtgtatgatccagatctatttcttcatcacattcatcaacatggatggcttcctcctgagtgtgatggcctatgaccgctatgtggccatctgtcaccctctccgctacaccatgatgatgagatccagactctgtgtcctcctggtggccatatcatgggtcatcacaaacctgcatgctctcttgcatactctcctcatggttcgactcaccttctgttcccacaatgcagtgcaccacttcttctgtgacccctaccctatcctgaagctctcttgttctgacacttttatcaatgatgttgcagccttcactgagggtcccttgatattcctgacaccacttatatgcattgttctttcttatgcctacatctatgctaaggtcttgaagatgccctctgctcacaggataaggaaagccctatccacatgtgggtttcatctcactgtagtctgcctcttctatggggcgatcctgggggcttataagcatccttcttcctcctactcactacaggatgcagtggcctctatcatcttcaacgtggtgacacccatggtcaaccctttcatctacagcaagaggaatcatgacatcaaaggagccctaaaaaaataattctcagaacc

SEQ ID NO: 806 - DNA, 763 bp, Mus musculus
  MOR253-10P
cacccgagtctaagactgttcctgatgggctgtttccctgtccctgtacacagtggctttaatgggtaacatggtgatcattgctttgatcacctccagcactgggctccacagtcccatgtactttttcctatgcaacttagcaaccatggatattatctgtacctcctctgtgctgcccaaggcgctggttggtctactgtatgaagaaaataccatctccttcaaaggatgcatggcccagctcttctttcttctgtggtctggatcctctgaagtgctgctgctcacagttatggcctatgaccgctatgtggccatctgctgtcccctccactacagctctagaatgagcccacagctgtgtgcagctctggccgtggctgtatggtccatctgtgctgtgaatgcatctgtacacactggcctgatgacacagctgtcattctgtggtccaaaggtcatcacccacttcttctgtgagattcccccactcctcctgctctcctgtagtcctacatatgtaaatagcgttatgactcttgtggcagatgccttttatggaggcatcaattttttacttaccttgctatcctatggctgcatcattgccagcatcctgcacatgcgttctgctgagggcaagaggaaggccttttctacctgctcatcccacctcatcgtggtttctgtgtactactcatctctgttctgtgcctatatcagtcctgcctccagctacagcccagaaagaagcaaattt

SEQ ID NO: 807 - DNA, 624 bp, Mus musculus
  MOR253-11P
tcttctttcttcctgtggtctggatcctctgagctgctgctgctcacagttatggcctatgaccgctatgtggccatctgctgtcccctccactacagctctagaatgagcccacagctgtgtgcagctctggtcgtggctgtatggtccatctgtgctgtgaatgcatctgtacacactggtctgatgacacagctgtcattctgtggccccaaggtcatcacccacttcttctgtgagattcccccactcctcctgctctcctgtagttctacatatgtaaatagcgttatgactcttgtggcagatgccttttatggaggcatcaattttttacttaccttgctatcctatggctgcatcattgccagcatcctgcacatgcgttctgctgagggcaagaggaaggccttttctacctgctcatcccacctcatcgtggtctctgtgtactactcatctgtgttctgtgcctatgtcagtcctgcctcaagttacagcccagagagaagcaaatttacctcggttttgtactcagtcctcagtccaaccctcaatcccctcatctatacactgaggaacaaggatgtcaagcttgccctgagaagactcttgccctctttc

SEQ ID NO: 808 - DNA, 934 bp, Mus musculus
  MOR248-12
atgaatgaagtgaatcagtccatggtgtcagaatttgtgctattgggactttccaactcacagaatcttcaggtcttgctctttgtgatatttttgatagtttatctgctcattctgtcaggaaatattgtcatcgtgatcttaataaccattgaccgccatctccattcccctatgtacttcttgttggccaacctgtcctttgttgatatatggctttcctgttaccactccaaaaatggtcacagattttctcagggaaaacaagaccatttcctttgaaggatgtatgtcccaggtcttctttgatcattgcattggtgcagcagagatggtgctattgctggttatggcttatgaccgctatgtggccatctgcaaacctctccactatttcaccattatgaacctgaaaagatgcactgcattggtgttgatttcctggacaattggctttgtgcatgccttgagtcaacttgtaccagttctgcaactacctttctgtggtccattggaaatagacagttttttctgtgacataccattggtaatcaacctagcctgcatggattcccatcatttggatactttagtaaatgctgattgtggggttgtggttgtaacttgctttattctgttgcttatatcttatacttatatccttatcactgttcatcagagctctaaggctggggcatctaaggccttgtccacgtgcactgcccacatcactgtggtgttgctcctttttgtgccctgtattttcatctatgtttggcccctcaatatcacctggtttgacaaatttcttgctgtgttttattctgttgttacacctctcctaaatccagccatttatacactgagaaataaagatataaaacattccctaaagagattaaaaagctcttttatgaatcacaaggtaaatact

SEQ ID NO: 809 - DNA, 944 bp, Mus musculus
  MOR275-3
atgagcaactatactggacagtcatatttcaccctggtgggactcttcagccaatctaaacaccctgccctgcttgctgtggtcatatttgtggttttcttgatgtccttatctgggaacgccctcctgatcctgttgatactctctgacacccacctccacacacccatgtacttttttatcagccagctgtccctcatggacatgatgtacatttctgtcactgtgcccaagatgctcatggaccgcatcctggggaaccacaaagatctcaagctgctgcctgtgggatgcagatgttcttatacatgtcactaggaggttcagaatttttgcttctagctgctatgtcttatgaccgctatgtggccatctgtcatccactccggtatcctgtcctcatgaaccacagggtgtgtctcctcctgatatcaacctgttggatcctaggatcattggatggcttcatgttcacccctgtcaccatgaccttcccattctgtggatctcgggagatccatcacttcttctgtgaggcccctgctgtgacaaagctctcctgctcagacacctggctctatgagaccctcatgtatgtgtgctgtgtgctcatgattcttattcctgtgacagtcatttcaggctcctatacatccatcctcctcactgttctcaggatgaactcagcagagggcaggaagaaggcccttgccacctgctcctcccacatgactgtggtcaccctcttctatggcgctgctatttatacctacattttccctgtttccctccacagccctgagaaggacatggtggtgtctgtgttttacaccatacttacccctctgttgaacccactaatctatagtcttaggaataaaaatgtcacagagggctatgaagaaactgttgggtataagactccactttcccagaaacagtga

SEQ ID NO: 810 - DNA, 624 bp, Mus musculus
  MOR139-5P
atggaatcaggcaacagcacaagaagaattccaagtttttttcttcttggattttcagaaaacccacaccttcaattcctcatttttgtactgttcctttccatgtacctggtaacagtgcttgggaacctgctcatcatcatggtcatcatcacacagtctcccctgcacacacccatgtacttcttccttgctaacctgtcctttgtggacatctgtttcacctccaccactgtcccaaagatgctggtaaatatacagactcaaagcaaggccattacatatgcagactgtattagccagatgtctgtcttcttggtttttgcagaattggacaactttctcctggctgtgatggcctatgaccgatatgtggctatctgtcacccattgtattacacattcattgttaaccaacatctctgtatactgatggttctgctgtcctgggttgttagcatcctacatgccttcttacagagctcaattgtgctacagttgaccttttgtggagatgtaaaaattccccacttcttctgtgagcttaaccagctgtctcaactcacatgtttagacagcttatcaagccacctcataatgaatcttgtacctgttctattgggc

SEQ ID NO: 811 - DNA, 663 bp, Mus musculus
  MOR267-10
tttctggcctgtgccgccgatgttcttctccttcacatttggcttacccattcctttctactaaccgtcatgggttatgaccgctacgtggccatctgtcacccactgagatacaatgtgctcatgagcccccgtggttgtgcctgcctggtaacctggtcctgggttggtggatcattcatggggacagtggtgacgacagccattttcaacctcacattctgtggacccaatgagatccaccattttgcttgtcatgttccacctctattgaagttggcatgtggagagaatgtactggaggtggcaaagggtgtaggaatagtgtgcatcacagccctcctgggctgctttctcctcatcctcctctcatatgccttcattgtggttaccatcttgaagataccatcagctgagggtcggcacaaggctttctccacatgtgcatcccacctcacagtggtggttgtacattatggctttgcttctgtcatttacctcaagcctaagggccccaagtctctggaaggagatactctgatgggcatcacctacacagtcctcacccccttccttagtcccatcatcttcagtctcaggaacaaggagctaaagaatgccatgaagaagatcttcctaagtaaactctatccagagaaaatt

SEQ ID NO: 812 - DNA, 926 bp, Mus musculus
  MOR251-4P
atgatgaacttcagcattgttagtgagtttatgattctgggacttactcaaaagtctgaacttcagggaatacttttcattgtttttctttttatctaccttgtggctctacttggtaatatgctaattgttgttgccataatctataacaccaccttgcacacacccatgtatattctccttctggccttggctgtggtggacataatctgcactacaagcatcatacccaaaatgttgggaactatgttaacatcaaaaaattcaatttcatatgggggttgcatgtcccagctcttctttttcacatggtccttgggggctgagatggtgctctttactacaatggcctatgaccgctatgtggccatttgcttcccacttcgctatagtactattatgaaccactatacatgtgtaggcttgcttagcattgtcatggctattgctgtaaccaattcctgggtgcacactggtctcattctgaggctgactttctgtgggccgaatataattgaccacttctttctgtgaaataccccccgctgcttgctttgtcctgtagtcctgtaagagtcaatgaggtgatggtgtatgttgctgatatcaccctggctgtgggagactttactctaacctgcatttcctatggatttattattgctgctattctccgcatccgcacaacagaaggcaagaagaaggccttctctacgtgctcatcgcacctcatggtggtgtccctttactattctcctgttatctacacctatatccgacctgcatccagctatacctttgataaagacaaggtggtagctgcactatatactctagtaactcctacattgaacccaatagtatatagcttcaggaacaaagagatgcagtcaggaattaagaaagtatttgcatttttaaaaggt

SEQ ID NO: 813 - DNA, 955 bp, Mus musculus
  MOR262-12
atggatgtatccaaccagacgactgtaacagaatttgtcctgttgggcctctccgcccaccccaaactggagaaaaccttcttcgtgctcatcttgtcaatgtacctggtgatcctgctgggcaacggggtcctcatcctggtgagcatcctcgactcccacctgcacacgcccatgtacttcttcctggggaacctctccttcctggacatctgctacaccacctcctccgttcccttagtccttgatggttttctgacccccaggaagaccatctccttctcgggctgtgccgtgccagatgtttctctccttcgccatgggagccacagagtgtgtgctcctgggcatgatggcgtttgatcgttatgtggccatctgcaacccccttagataccctgtggtcatgaacaaggctgcctatgtgcccatggccgtcagctcctgggtggctggcggtgctaactccttggtgcagatctcccttgcggtgcaattgcctttctgtggggacaatgtcatcaatcatttcatctgtgagatcctggcagtcttaaagctagcctgtgctgacatctccatcaatgtgatcagcatgggggtggccaatgtgattttcctgggggttccagttctgttcatctttgtctcctacatcttcatactctccaccatcttgaggatcccctctgctgaggggaggaagaaggccttctccacctgctctgcccacctcaccgtggtgatcattttttatgggaccatcctcttcatgtacgggaagcccaagtccaaggacccactgggggcagacaagcaggaccttgcagacaagctcatctccctcttctatggactgctgacccccatgctgaaccccatcatctacagcctgaggaacaaggacgtgaaggccgctgtgaggaacctggcaagtcacagatgcctcaccttc

SEQ ID NO: 814 - DNA, 928 bp, Mus musculus
  MOR171-26P
atggaggacatggcagcaggaaaccactgcacagtgactgaattcttcttggtggggctctcagagaagcctgaactccggcttccccttttcctcttcttcacaggaatctatctgatcactgtgacagggaacgtgggcatgatcacactgattgggctcagttcccacctgcacacacccatgtactttttcctcgacagtctgtcctttattgacttctgtcagtcctaaaatgctggtgagctttctgacaaagcagaacattatctcctacactggatgcatggcccaactctacttagtcatcacttttggtgttgcagaatgctacacattagctgcaatggcatatgaccactatgttgccatctgtaaccccctgctttacaatgtaaccatgtcctatcagatttacagttctctgatttcaggagtatatatttttgctgtgttctgttcatccttaaacactggcctcatgtttaggactcagttctgcaatttagatgtgattaaccactatttctgtgatcttcccctcttgaaacttgcatcctctaatacgtataccaatgaaatattgattctattttttgctacactgaatgtctttgtcacagttctgaccattatcacttcctacatcttcattattgccaccatccgctgcattcactccagggagggcaagttcaaagcttttagtacttgcagttcccacatctctgctgttgctatcttctatggttctggtgcattcacgtacttacagccctcatcattgaattctatgggccaagcaaaagtgtcctctgtgttttatactactgttgtacccatgctgaaccccttgatctacagcctgaggaataaggatgtcagtattgcattgaagaaaatacttcaaagaaaaaaaaatcatgtg

SEQ ID NO: 815 - DNA, 959 bp, Mus musculus
  MOR5-3
atgttgtatccatcaagtatgtcagaaataactaacttcactcatgatcctttctacttcatcctcaccggcatcccaggatttgaggatatccatctctggatctccatccccttctgtctctacaccatctccatcatgggcaacaccaccatcctcactgtcatctgcacagagccatctcttcaccagctcattacctcttcctctccatgctggccctcactgacctgggtctcgctctcaccacactccctaccatcatgcacctcctttggttcaacattcgggaaatcagctttgaagcctgctttgcacagttcttcttcctccatgggttctcattcatggaatcatctgttctattggccatgtcctttgaccgttacgtggccatctgctgcccactccactatgcctccatcctcaccagtgaggtcattgctagaatagggttggccatcatttgccgctgtgtcttggctgttcttcccttccttttcctgctcaagcgcctgtccttctgccattcccaccttctttcacactcctactgcctccaccaggatatgattcacctggtctgcactgacatcagggtcaacagctggtatgcatttgctctggtcctgctcattattatattggaccctctgctcattgtactctcctatgcagttatcctgaagagtgtcttgaacacagccacttggactgaacgacttcgggctctgaacaactgtctgtcccacatgctggctgttctggttctctatgtccctatggttggtgtgtctatgactcaccgctttgccaagcatgcctctccactggtccatgttctcatggccaatatctacctgctagcacctcctgtgatgtaccccatcatttacagtgtaaagaccaagcagatccgtcaaggaattactcgcctcctcttgcagagaaaggtgcac

SEQ ID NO: 816 - DNA, 922 bp, Mus musculus
  MOR202-21
atgaagaacagcacagaagtgacacactttctcctgttgggactcaccgatgacccaggactacagcttcccctcttcttgatatttctcttcatctacaccatcacccttgtgggaaatctgggtatgatcctgctgatagtcctggactctcgtctccacacacccatgtacttttttctgtgtaatctgtccttggtggatttttgttactcctcagcagtcacacccacagtaatgactgggctcctaataggaaacaagatcatttcctataatgggtgtgctgctcagatgttctttttttgctggctttgctactgtggaaaactatctgcttgcctcaatggcctatgatcgctatgcagcagtgtgtaagccactacattattcctctaccatgactaccagtgtatgtataagtctttctatagtttcctatgcttgtggttttctgaatgcctctatccatattggggacactttcattctttccttctgtaggtctaatgtagtgcatcactttttctgtgatgttccagctgtcatggttctctcttgctctgatagacatgttagtgagctggttcttgtttatatagtgagcttcaatatctttgttgctctctcagttatttggatatcctatatattcatttttatcacaatctttaaaatgaaatcaagtgctggatatcgaaaggctatatctacttgtgcctctcacttcactgcagtgtccattttctacgggacgatcatattcatgtatttgcagcccagcttcagtcactctatggacactgacaaaatcgcatctgtgttctacaccatggtcatccctatgctgaaccctctggtctatggcctgaggaacaaggaagttaagagtgcattcataaaaacttttcaagtggcaaaa

SEQ ID NO: 817 - DNA, 956 bp, Mus musculus
  variation (186)...(357): Any nucleotide A, C, G or T
  MOR171-27P
atgaatcattcttcagtgattgattttatcctcgaaggattaacaaaacgcccagagcttcagctcccactgttcctcttgtttctggcaatatatgtgatcacagtagtgggaaacttgggcatgatcctcttaatcaccattagttctcaacttcactctccaatgtattattttctcagtcannnnnnnnnnnnnnnnnnnnnnnnnnnnnnnnnnnnnnnnnnnnnnnnnnnnnnnnnnnnnnnnnnnnnnnnnnnnnnnnnnnnnnnnnnnnnnnnnnnnnnnnnnnnnnnnnnnnnnnnnnnnnnnnnnnnnnnnnnnnnnnnnnnnnnnnnnnnnnnnnnnnnnnnnnnnttttgttattgcagaagggctacctgctgacagccatggcctatgaccgctatgttgccatctgtagcccactgctttataacattgtcatgtcccacaaggtctgttccataatgatggctgtggtatactcactgggcttctttggggctactgtccatacaacccgtatgacaatgttgtccttctgtgggtctcatattgtcagccactatttttgtgatatcctacctttgttgactctgtcttgctcaagcacccatatcaacgaggtactgctgtttattattggtggagttaatacccttgcacctacactggctttcattctgacaagtattcttcgcatccgctccaatgaaggacgttccaaagcatttggcacctgtagctcccacattatggctgtgggaatcttctttgggtcaattactttcatgtatttcaagccaccttccagtaataatatggaacaggagaaagtgtcctctgtgttctacaccacagtgatccctatgctaaatccccttatatacagtctgaggaacaaggatgtaaagaatgcactgaaaaagatggttggtggaaggcagctatcc

SEQ ID NO: 818 - DNA, 1011 bp, Mus musculus
  variation (308)...(327): Any nucleotide A, C, G or T
  MOR264-8P
aaatttaccacatctacagatgaagtcctattcaaacgagaaaaattgaatgcctccacactgatggaattcattcttcttgggttttctaatgttcctcatttgcagtgggtgctgtttatggtatttttgtttatgtatatgacaattctgttgtgcaacagcattataatagtgttagcaaaaactgaccctgctctccagactcctatgtattttttccttagcaacttttcttttttggaaatctgttatgtaacagctactattccaagaatgcttatggatttatatacctaaaaggaaannnnnnnnnnnnnnnnnnnngaaacatttctgtgtttgcctgtgcaacacaaaatgtattttgtccttacgttgggaggcacagagtgcctcttgctagcagctatggcctatgatcgttatgtggctatctgccaccctctccaatattctttacttatgaagaataaagtgtgtttacagctggtagctgcctcctggatcagtgggattccagtagaaattgggcagacctaccagatattctcccttcacttttgtgcttctaacagaatagatcactttttctgtgacattcccccacttctcaagcttgcttgtggtgacacctttatgaatacagttgcagtctatgttgttgcagtgttgtttgttatggttccatttctgctaatcattgtctcctacatcaagattatctgcaacattatgaaactatcttcagccaaagggatggccaaggctttttccacctgctcgtctcacctgatagttgtaatcttgttctatggaacagcaagcattacttacttacagcccaaacaaagtcagtcagaaggaatggggaagatgctgtctcttttctacaccattttgatcccagctttgaatcctattatatacagtctgaggaacaaagatatcatgatggcactgagaaaattacacagtaagttactgatatggtgggaaaacttaaaatag

SEQ ID NO: 819 - DNA, 929 bp, Mus musculus
  MOR4-2P
atgtcaaacttaagtacctctagatttgttcttactggatttcctggcctggaagtctactacttcttctttgccattcctttctcaaccatctatgcaatggtgttcctgggaaactgcatgatacttcatgtaatccgaacagagtcaagcctgcaccagcccatgttctatttcctagccatgttagccctcacagacctatgcatggggctgtctactgtgcacacggttctgggaattctttggggatttcttcaagagatcagccttgatgcctgcattgcacagtcttacttcatccatggtttgtccttcatggagtcctctgtcctcctcgccatgtcctttgatcgctacattgccatttgcaaccctctacgctattcctccatcctaaccaatgcacagaatcctgaaaattcggagtggccatcttatgtaggagttctatgctcattcctcccgttattatccgcctgaagttcttaaattactgcaggcctcatttcctctcccactctttctgcctgcaccaagacttgattcgaatggcttgttcagatatccgctttaacagtttctatgctctgtctctggtgatttgcaccctgttactggatgcagtgctcattcttgcctcctacgtgatgatcctgcacacagttctatcgattgcatccagggaggagagaatcaagtctttgcaaacatgtgtatctcacatctctgctgttttggttttctacatccccatcattggtctgaccatggttcaccgctttgggaagcatctctctcctctggttcaggtcctcatgggcaacatttacatcctttttccacccttgatgaaccccattatatacagtatcaagactcagcagatccgagtgagaattcagagactgttttccttgaatggaatc

SEQ ID NO: 820 - DNA, 401 bp, Mus musculus
  MOR177-11P
atgtcagttttcttaatgtcaaatttaagtacctctagatttgttctcactgggtttcctggcctggaagtctactacatcttgtttgccattcctttctcagttatgtatgcaatggtattccctggaaactgcatgacacttcatgtgatccaaacagatccaagcctgcaccagcccatgttctatttcctgggcatgttagccctcacggacctatgcatggggctgtctactgtgaacatggtgctaggaattttgggggacttccttcaagagatcagccttgatgcctgcatttactacagtaaaggtaatggttgtcagaaatttgtgtttgtaaacatcaatttcaaaccttattctcagtctgtaaaagataaaatctttttttaagaaac

SEQ ID NO: 821 - DNA, 691 bp, Mus musculus
  MOR40-6P
caggtcctgcttatcttctggttcaacatgaaacccatcagctttgtgggctgcttcctgcagatgtttgtcatgaataccttccttcctatggaatcctctacctttctggtcatggcctatgatcgctatgtggctatctgccatcctctgcgctacccatccatcatcacagaacagtttgtcattaatgcagccatttttattgttgcccgcaatcttctagctacactgcccactccagttctggctgctagactcaattactgtgccagcaatgtggtggagaactgcatatgtgccaatatttctgtagcaaagctttcctgtggggacattcgcctaaataagctctatcaatttgtgagcgtttggtgcctacttggttctgatctggtcctcattttgctctcttactgcttcatcttgagggttgttatgtgtcagcagtctggaggcactgtcaccaaggccttgagtacttgtggttcacatctcatccttatactcttcttatactttgttgctagtctttatcttcacaaacaaggcaggaaagaagataccgtcagaggtaccaattcttcttaatgtgctgcatcatctcatcccacctgccctcaatcccattgtgtatggagtacgaacccaggaaatcaagcaggggattatcaagctattcaaacactag

SEQ ID NO: 822 - DNA, 935 bp, Mus musculus
  MOR135-20
atgataaagaacaaccaaactctcttcagccagttcctcctcctgggcctgccgatccctgcagagcaccagcaactgttctttgccctgttcctgctcatgtacctcaccaccatcctggggaacctcatcatcatcatcctcattcgactggactcccatctccacacacccatgtacttgtttctcagcaacttgtccttctctgatctctgcttttcctctgtcacaatgcccaagttgctgcagaacatgcagagccaggacacatccatcacctatgcaggttgcctgacacaaatgtactttttttgattctttttggaggcctggaaatcttcctccttgtggtcatggcctatgaccgctatgcggccatctgccttccccttcactacaccagcatcatgagtctcaagttctgtgtgtgtgcagtgctgatttcctgggtatttaacttgctgtattccatgttgcacactctactcttggctaggttgtcattctgtgaggacaacataatctgccactttttctgtgacatgtctgccctgctcaagttggcctgctctgatatttatataaatgaacttatgatatttatcttgggagggccccttgtggtcattccgttcttactcattgttgtgtcctatgtacaaattatcttctctattctaaaggcttcatctactcgggccatctacaaggtcttctctacctgtggctcctacctgactgtggtgtcactattctatgggacagttattggtctctacttttgtccatcagaaaataactttacagcaaaggaggcttctattactatgatgtacacagtggtgactcccatgctaaaccctttcatctacagcctgaggaacagagatataaaggaggcccttataaaagttcttatcaagaaaataccttta

SEQ ID NO: 823 - DNA, 947 bp, Mus musculus
  MOR135-21P
atgataatgaacaaccaaactgccatcttccagtttctcctcctgggcctgccgattcccccagattaccagcacctgttctatgccctattcctggtcatgtacctcaccaccgtcctggggaacctcatcatcatcatcctcattcacctagactcccatctccacacacccatggtatttgttccttagcaatttgtccttctctgacctctgtttttcctctgtcacaatgcccaaattactgcaggacatgcagagccaagtaccatccatctcctatggagcctgcctgacacaaatatacttctttctggtttttggaaacatggagagcttccttcttgtggtaatggcctatgaccgctatgtggcaatctgcttccctctgcattacaccagcatcatgagccttaagctctgtacttgtctaatgctgctatcatggatgctgacgacatcccatgccatgatgcacacccctgctagcagcaagattgtctttttgtgagaacaatgtagtcctcaactttttctgtgacttatttgctcttctaaagctggcctgctcagatacttatgttaatgagttgatgatatttcttgtgagtggactccttgttgttattccattcctactcattgttatctcctatgcaaagattgtctcctccattctcagagttccatctaccaagggcatctacaaggtcttctccacctgtcgttctcacctgtctgtggtgtctctgttctatgggacaattattggcctctacttatgtccatcaggtaataattctactctaaaagaaaatgtcatggcaatgatgtacacagtggtgactcccatgttgaatcccttcatctatagcctgaggaacagagacatgaagggagccctagttagagttgtctgcaataagaaaatcagtttgaaatggtag

SEQ ID NO: 824 - DNA, 956 bp, Mus musculus
  MOR152-4P
atggaactgaaaaaccaaacagcagtttcagaattccatctgcttggactgacagacaatcacagaatgctgcccctcgtcttcatcatgttcctcttcatgtatctgattacagtttttggaaacctgattatcatcatggctatcagctctggctcccaactgcacactcccatgtacctcttcctctctattctttcaattaacgacatctgttatagtacagtcacaatccccaaaatgctggtgaacattcaagcccatgatgacagcataagttatatagaatgtctctctcaaatctgctttgtttcaatttttggtggcatggagaatttttctccctggcagtaatggcctatgatcgttatgtggccatttgcaaacccctgaggtacacagtcatcatgaaccctatttgctgtgtcctgatggttctattctcccttttctttagcattatggatgccctacttcacagtctaatggtcttgaggctttccttctgcacagacctagaaatcccacactttttctgtgagctggctcagattatcaaacttgcctgttctgatacgtttctcaataattttttaatatttgttgcagcatttgtctttgggggtggtcctgtctgtggaatcattttttcatatatttatattgtgtcatcagtcttgagaatgccatcttctggagggaagcacagggctttttctacctgtgcatcacatctgtctgtggtttccttgttctatgggacaggctttggggtttacatcagttctgctgtgacagattctcttagaaacacagcaatggcttccatgatgtacagtgtagttcctccactgctcaacccatttatctatagtctaagaaatagagaaatgaaggaagccttgaggaaacttgttggtagactcatttatcttatatgatgcattatgtgctat

SEQ ID NO: 825 - DNA, 929 bp, Mus musculus
  MOR168-2P
atggactcagtaaatgtctctttggtggctgaattcattctggtgggattaactgacaagccttatcttcaaatacccctgttctttgtgtttctggcaatgtacctggtcactgcattgggaaatttatctttgataatattaactgtgttgaattctcaccttcacacccctatgtacttttttctctttaacttgtcctttgtagacctttgctattcttctgtgttcactccacaaatgctaatgaatttcataaggaagaatacaacttcttacatggaatgtatggcccaactctatttctccttgtttttttgttatttctgagtgttatgtgttgacttcaatggcctatgatcgctatgtggccatctgtaaaccactgttgtataatcttgtcatgtcctactaaattatgcttgaacctaatgcttgtttcctactttattgcattttctgagtctgtagctcacactgcttgcatgcttagactgaacttctgtgatgccaacaccatcaactactacttctgtgatattccccctttgcttcagctctcctgtacgaccacacgtgtcaatgaggttgtaatttttgttgttgggagcatcaatatcattattcctacttcaactatatttgtctcctatggttttattctctccagtatctttcgcatcagttcttctgaaggcaggtccaaagctttcagcacttgtagctcacacatcattgctgcttttctgttcttcggctcaggtgcaatcaggtatttcaaaccctcctcagatgggtctatggatgaaggaaaaatctcttctgtcttttataccaatgtgattcccatgataaatcctctactctatagcttgaggaacaaagacattaaagttgccctgaggagaacactgaggaaaaggaacttt

SEQ ID NO: 826 - DNA, 938 bp, Mus musculus
  MOR135-22
atggtaatgaacaaccaaacagtcatctcccagctcctacttctgggtctacacattcccccagatcaccagcacggattctacaccctgttcctggccatgtacctcaccactatcttggggaacctcatcattatcaccctcataatactggactcccatctccacacacccatgtacttgtttctcatcaacttatccttctctgatctctgcttttcctctgtcacagtgcccaagttgctgcagaacatgcagagccaggacacatccatctcctatgctggctgtctgacacaaatgtactttttaatggtttttggagatatggagagctttcttcttgttgtcatggcctatgatcgctatgtagccatctgcttccctctgcattacaccagcaccatgagtcctaagttctgtgtgtgtgtgtggtgctgctgtcatgggtatttaccattatgtattccatggtgcacactctactcttgtctagattgtcattctgtgaggacaatgtaatcccccattttttctgtgacctatctgccctgctcaagttggcctgctctgacatttttataaatgaactaatgatatttatcttgggagggcctgtcgttgcgatcccattcttactcattgttgtgtcctatgtacgaattgtctcttccatcctaaaggtttcatcttctcagggtatacacaagatcttctccacttgtggctcccatttgtctgttgtttcactgttctatgggacaattattggtctctacttatgtccatcagctaataactctactgtgaagaagattgccatggccatgatgtatacagtagtgactcccatgctgaatcccttcatctatagcctgaggaacagagatatgaaagaggccctgatcagagtcctttgcaagaagaaaatctcctta

SEQ ID NO: 827 - DNA, 973 bp, Mus musculus
  MOR133-1
atggcaagaggaaaccagaccagcacctttgagttcctcctctggggactgtcagagcagccacagcagcaacacattctcttcctgatcttcctggggatgtacctggtcactgtagcagggaatctgctcattgtcctggccattagcactgatgtacgactccacacacccatgtacttcttccttgccagcctgtcctgtgatgacatactcctcgtctccaccatagtgcccaaggccctagtgaacatccacacccaaagcaggaccatctcctatgcaggatgcctggtccagctctattttttcttgacttttggagacatggacatctttctcctggccacaatggcctatgatcgctttgtagctatttgccaccctctccactataggatgatcatgagcttccaacgctgctcactcttagtgacagcctgttggacccttacaaaccttgttgccatgacacacaccttcctcatattccggctctccttctgctctcagaaggtcattccagacttcttctgtgacctgggacccctaatgaagatcgcttgctctgaaacccggatcaatgagcttgtgcttctcttcctgggggggtgcagtcatcttaatcccccttttgctcatccttgtgtcttatatccgcattgtgtcagccatcatcagggtcccttctgcccaaggaaggcgtaaggccttttctacctgtgggtcccacatttctgtggtggccctattctttgggactgtgataagggcttacctatgtccctcatcctcttcctctaactcagtggtagaggacacagcagctgttgtcatgtatacagtggtgactcccttgctgaaccccttcatttacagcctgcgaaacaaagacatgaagggagcactggtcagaattctcaagggcaaagtctccttctcctgggcccagggacttctgcagagaaagtga

SEQ ID NO: 828 - DNA, 950 bp, Mus musculus
  MOR283-10P
atggagtcctggaactccacattgggaggtaccttcatcttggtggggattctagatgacagtggctctcctgatctgctctgtgctgtaatcacagccctgtacatgttagctatgatcagcaatgggctgcttctgctggtcatcaccatggatgcacagctccacgtacctatgtaccttctgcttgggcagctctctctcatagacttctttctcacatcaattattatccccaaggctgtcatggattttctgctaaaagacaacaccatatcattagagggctgtgcccttcagatgttcctagcactgacacttggtggtgcagaagacctccttctggccttcatggcctatgacaggtatgtggctatttgtcatcctctgaactatatgattttcatgagaccaagcatctgctggcttggagtagccacatcatggatcctgggacttctgagtgctctaggatataccatccatacaatgcaatatcccttctgcaaatcccgtaaaatcagagatctatattgtgaaatccctccattgctgaagctggcttgtgcagacacctccaaatatgaactcatggtttatgtgatgggtgtggccttcctaattccccccacttgctgccatcctagcttcctacatattaattcttttcacagtgcttaacaagccttcaaatgaaggaaggaagaaagcaccttgtcacctgtttttctcacttgacagtagttggtctgtactatggggctctcacagttatgtatgtcctacccagttcctatcttagtcccaaacaagagaacctcctctctgttttctacactgtcgtgaccccagctctaaaccccctcatttacagcctgaggaataaggaggtcactggggccttgaggagggtcttgggtaagtggtttctgcctacacagtctactttt

SEQ ID NO: 829 - DNA, 943 bp, Mus musculus
  MOR275-4
atgaacaactacactacacagtcagatttcaccctggtgggattcttcagtcaatccaaacaccctgccctgcttgctgtggtcatatttgtgcttttcctgatggccttgtctgggaacgccctcctgatcctgctgatactctctgacatccacctccacataccaatgtacttttttatcagccagctgtccctcatggacatgatgtacatttctgtcactgtccccaagatgctcatggaccaggtcctggggagccacaagatctcagctgctgcctgtgggatgcagatgttcctctatgtgacactagcagggtcagaatgtttccttcttgctgccatgtcctatgactgctatgtggccatctgccatccactccagtatcctgtcctcatgaaccacagggtgtgtctcctgctgatgtctttatgttgggtcctgggatctttggatggcttcatgttcacccctgtcaccatgaccttcccattactgtggatcccgggagatccatcacttcttctgtgaggttcctgctgtgacaaagctctcctgctcagacacctggctctatgagaccctcatgtatgtgtgctgtgtgcttatgcttctcatccctgtgacagtcatttcaggctcctatacatccatcctcctcactgttctcagaatgaactcagcagagggcaggaagaaggcccttgccacctgctcctcccacatgactgtagtcaccctcttctatggcgctgctgtctatacctacatgctccctgcctccctccacacccctgagaaggatgtggtggcatctgtgttttataccatagtcacccctctgttaaacccactaatctatagttttaggaataagaatgtcacagaggctgtgaagaaactgttaggtgtgagcaccctctttcaagaaacagtaaag

SEQ ID NO: 830 - DNA, 955 bp, Mus musculus
  MOR184-9
atggagaagacaaatcactctttgaccacacagttcatcctggtgggattctcagatcacccagacttgaagacacctctgttcctgctgttctctgtcatctatctggtcaccatggtggggaatcttgggctggtggccgtgatctacttggagcctcgtctccacacacccatgtacatctttctgggcaacctggctctgatggactcctgctgctcctgtgccatcactcccaagattctagagaacttcttttctgtagacagaaggatttctctctatgaatgcatggcacaattctattttctgtgtcttgctgaaactgcagactgctttcttactggcagcaatggcctatgaccgctatgtggccatatgcaaccctctgcagtaccacagcatgatgtccaagaaactctccattcagatgagtataggcacattcataaccagtaacctgcattccttgattcatgtagggtgtctcttaaggttaactttctgtaaatctaacagaattgatcatttcttctgtgatattcttcccctatatagactctcctgtacagacccatttatcaatgaattaatgatatatattttttctatgccaattcaagtcttcaccattaccactgtcttggtctcttacttctgcattcttctcactattttcaagatgaaatccaaggatgggagaggaaaagcattttctacctgtgcatcccactttttttctgtgtcaatattctacgtctgtcttcttatgtatattagaccatttgacgaaggtaataaagacataccagtggctgtattttatacaataataattcctttgctaaacccttttatttacagcctgagaaataaggaggtagtaaatgctgttaagaaagttatgaaaactcatagtatttttaaaaatgcttcagcttctatggcacgctaa

SEQ ID NO: 831 - DNA, 934 bp, Mus musculus
  MOR233-14
atgcaaaaccagagctttgtcactgagttcatactcttggggctttcccagaacccaaaagttgagaaaatactgtttgttgtatttttattggtctatattgcaactattgggggaaacatgataattgtggtgaccatcatctatagccctgcactgttgagttcccccatgtacttcttcttaatatttctgtctttcctggatgcttgcacttcctctactgtcacccccaagatgattgtagacttcttctatgagaggaagaccatctcctttgaatgttgcatcacacaactgtttactagccacttctttgcaggagttgaggtgattatcttgacatctatggcctatgaccgctatgtggccatctgcaagcctcttcactactcttccatcatgaccaggaggctctgtggcactctcgtaatggtggcctggacaggaggattcttacattctatcacacaagttatcttcacgttgcagctacccttctgtgggcccaattttattgcatcatttcatatgtgacttgttcccattactgcagcttgcctgcactgacacacacatttttgtcattttggtgtttgctaatagtgggtctttctgcatcattatcttctccttgttgattgtttcctatggtgtcatcctcttctctctaagaggtcacagctcagaaggacgaaggaaagctctctcaacctgtggatcccatattactgttatgatattattctttgtcccatgtatgctaatatatgcacggccttcatctgccttttcctttgagaaaaacacacttatatttgcctctgtcctgacaccattgttcaatcctatggtttacactttcagaaataaagaaatgaagaatgccatcaggaaaatgtgtaggaaattgttagtagattctgataacttt

SEQ ID NO: 832 - DNA, 605 bp, Mus musculus
  MOR233-14
ttgggcctttcagctgatccagtagttacagcccattattttcggactgttccctgtttatgtacctggtcacatttctggggaacctaattataaccctgaccatcagtgctgagtgccatctccatacacccatgtacttttttctctccaatttatctgtggctgatatctgtataagctcaactacagtcccaaagatgctcttgaacatccaaacacaggatcacagaataacttactcaggctgcctcactcaggcttgctttgtcttgctttttgctggattagaaaattgcttgcttgcagcaatggcctatgaccgctatgtggccatttgccaccctctgaggtacacagtcatcatgaactcatgcttctgtagtatacttattgtagtttccttggctattagtgctgtcaatgcactactgctcagtctcatggtgctgcatctgaatttctgcacaaaggttgaaatcccacacttcttctgtgaacttgctcagatcataaagcttgcctgctcagatactctcataaataatattttgatttatatctcagctttcatgtttggtggtattcctttctttggaatattt

SEQ ID NO: 833 - DNA, 951 bp, Mus musculus
  MOR32-6P
atggtctctctcaatcacacacaattccatccctactttcttcttcttcttctgggaattccaggtctggaggacacacatctatggattggatttcctttttgttgttgttgttgttgtatatttgactgctcttctgggaaatattacgattatttctgtgattcagactgaacacagcctccaccagcccatgttctacttcctgtccattctgtcatctattgtcctgggcttgtccacatccaccatccccgagatgcttagaaccttttggcttaattttaaaaagatattatttgatggcggtgttatccagatgttcttcatccatctgttcataggtatggagtcagctgtgcttttggccatggcttatgatcgctatgtggccatctgtaatcctcttcactacacactggtgctgacaaacaaggtagtattcatcaatgcttgccttgtcctcctgagacccttagtcactgcaattccctttattgtgctcatccagagattacccttctgtggacatcaagttattctgcatacatactgtgagcacatgggcattacccttctgccctgtgccagcatcaaggtgaacatcatctacggtttgtgtgccatctctaccctggtttttgatattgtagcaattattgtctcctatatattcaggtcctccatgctgtctcccacctaccttccagggatgctcgactaaaggctctcagcacctgtggctctcatgtctgtgtcatcctttccttctgtacaccagcatttttctcctttatgattaaccagtttgagcgaaatgttccccgatatatccatattcttcttgccaacctttatgttgtcattcctcctgctcttaaccctgtcatttatggtgttagaactaagaaaataagagagagggtagctatggctatcagaaataaattg

SEQ ID NO: 834 - DNA, 486 bp, Mus musculus
  MOR253-12P
atgaactggatactccacacaacaatggtcagtcccaaccagacagtagtgacagagtttgtgctgcaagggttctcagagcacccgagtctaagactgttcctgatgggctgtttcctgtccctgtacacagtggctttaatgggtaacatggtgatcattgctttgatcacctccagcactgggctccacagtcccatgtactttttcctatgcaacttagcaaccatggatattatctgtacctcctctgtgctgcccaaggcgctggttggtctactgtatgaagaaaataccatctccttcaaaggatgcatggcccagctcttctttcttctgtggtctggatcctctgaagtgctgctgctcacagttatggcctatgaccgctatgtggccatctgctgtcccctccactacagctctagaatgagcccacagctgtgtgcagctactggccgtggctgtatggtccatctgtgctgt

SEQ ID NO: 835 - DNA, 789 bp, Mus musculus
  MOR260-6P
cttcttcctcttcctcttatctacctgctcactgtgctgggaaacctgctgatcatcgtgctcatccactcagaccccagactccacacccccatgtactttttccttagaaacctgtcctttgcagatctctgcttttctactaccacagtgccccaggtgcttgtccacttcctggtgaagaggaagaccatttcttttgctggatgctccacacagatagtggtgttgcttctggtcggatgcacagagtgtgcactgctggcagtgatgtcctatgaccgctatgtggctgtctgcaagcctctgcactactccaccatcatgacacactgggtatgtgttcagctggctgcagggtcctgggccagtggtgcacttgtgtccctggtggataccacattcacattacgtcttccttatcgaggaaacaatgtcattaaccactttttctgtgaacctcctgccctcctgaagctggcatcggcagatacatacagcacagagatggcgatctttgcaatgggtgtggtaatcctcctagcacctgtctccctcatcctcacctcctactggaacattgtctctactgtaatccagatgcagtctggggaaggaaggctcaaggtcttctccacctgtggctcccacctcattgttgttgttctcttctatggctcaggaatatttgcctacatgaggcccaactccaagataatgaatgaaaaggataaaatgatttcagtgttctattcagcagtgaccccgatgctgaatcccatcatttac

SEQ ID NO: 836 - DNA, 874 bp, Mus musculus
  MOR32-7P
ttgcagttctggcttggtttgccatttggaacagcctatcttattgctgtcctagggaatgtcatcattctctttgtaatctatctagagcacagccttcaccagcctatgttctacttactggccatactgtctgctactgacttgggtctgtttacagcaactgttcccagagcacttggcatatactggtttggcttccataagattgcctctaggaactgtagctcaaatgttcttcatgcatctgtttacaggcatggaaacattcatacttgtggctatggcctttgattgctacattgccatctgtaaccctctctgatacaacactatcctcaccaccagaatgatctgcattattgctggagttggactactcagaaatttcattttggtttttccacttatatttctcattctaaggcgttcattctgtgagcataatatcatactgcacacatactgtgagcgcatgggtattgctcgactggcatgcatcagcatcaaggttaatgtattatttggattaatactcatatatatgatacttctggatgttattttgagtgctctgtcctatgtgaaaattcttcatgctgtatttaaactcccatcctgggaagccagactcaaagctcttaatacctgtggttcccatgtgtgtatgatcttggctttcttcactccagcccttttctccttcttggctcatcgatttgggcacaatattccacgatatatccacatcctccttgctaacttatatataatcattcccctggttcttaaccctattatttatgggatgagaaccaagcagatacaagatcgtccagtgacgatattgtttagcaaggaagttttactgtga

SEQ ID NO: 837 - DNA, 921 bp, Mus musculus
  MOR105-6P
gtgatgtatattctcttcttctgcagaaagctccaggatggcagcctgctgtacttcttccctttgcttttcatctatactttcattgtcattgggaatctattgattttctttgctgtaaggctggacagccatcttcataatcccatgtataattttataagtattttttcctttctggagatctggtacaccacagctaccattccaaagatgctgtccaatctcatcaatgaaaagaaatccatcaccatcaccggctgcctcttgcaaatgtatttctttcactccttgggaaattcagaggggattttgctgatcagcatggctgttgacagatacattgccatctgcaaccctcttcgctatcagatgaccatgacacccagtctctgtgttcagctctctgcaggctcttgcatcttcggtttcctcatcttgcttcctgagagtgtgatgatttccactctgcccttctgtggaccgaatcagatccatcagatcttctaagacttggtcccctgtgctgagcctagcctgcacagacacttctatgattgtcattgaggacgtgatccacgcagtagccattatcatcactgttccttaccattgctctgtccctatgtaagaattgtcatcatgatcctgagaattccttctgctgagggtaggaaaaaggccttttctacctgtgctggtcacctcatggtctttctgatattctttggcagtgtatcactcatgcacttgcgtttcaatgccacttatcccccggttttagagacagcaattgcactgatgtttactgttcttgctcccttcttcaaccccatcatttatagtcttagaaacaaggacatggagaatgcaattaaaaggctcttctgccttcacaaagttttgaacacatctgaaagt

SEQ ID NO: 838 - DNA, 862 bp, Mus musculus
  MOR0-1P
tggcttcattcaacactattctatttcacttctaacttcctagaaatccctggattagaaaatatgcactgttggattggttttcctttctttgctgtgttgctgacagctgtacttgggaatataaccattgtttgtgtaattcagacagagtacagtcttcctcagcccatgttctacttcctggccattctgtcatctactgacctgtcatcacatctacaatcaccacaattcctggaatagtcttgttcaagataaaaggacatcatccaaatgttctgtatctacgtgttttctggcatggagtcagctgtgcttgtagccatggcctatgatcacttcatggctaactgttgccctcttcattatacattggtactgacaaacaaggtaatatttatcatttcttgggtgatccttttgagatcattgttttttttgccatgccctttgtcttgctcaccttatggttaccattttataagcaccaaatcacccttcaccttcatcaatgtcatcagcatctatggcttatgtgctacccctattctgatatgtgacattgtagccattatcatttcctatgttcagatcttcagtgctgcatttcaactatcttctcaggatgctcagctaaggcacttggcacctgtggatctcatgcatttgtcatttgacattctacactcttgttttcttttcatttatgacacataggtttggccataatataccacactgcatccatattcttgtggccagtgtctatgtagtcattctacctgttctcaaccctttaatttatagcatcagaactaaatggattatagaacaggtactgaaaatgttttgtaagaaa

SEQ ID NO: 839 - DNA, 950 bp, Mus musculus
  MOR31-15P
tcttcaaacactttaaattataccaatgtcagagatatctggtacaccatgattgggatcccaggattggaagaatcacacatatggatttccatccccatctgttcaatttacatagtggccattgcaggcaatgcactgctattattcctgatcatcactgaacgcagccttcatgaacccatgtaccttttcctgtctatgttggcactcgctgatatctgtctacagtcacaacaccaaaaatgttagcaatcttctggtttcgagctggaggcatttcttttgctagctgtgtatctcagatgttcttcctccacttcatatttgtggcagagtctgccatactgctggctatggcatttgaccgttatgtggtcatctgttatccactaagatacaccaccattctaaccacatctgtcatcatcaaaatgggcattgcagctgtgattagaagcttcttcatctgcttccccctgatctttcttgtctataggctcacctattgtgggaggaacatcattcgtcactcatactgtgaacacatgggcattgccaggttggcctgtgacagcatcaaggtcaatatttactatggcatgatagtggctctattttccatatgcctagatgcagtgctcatcatagtctcatatgcccttatcctttgtgctgtgtttagaattccttctcgagatgcccgactcaaggctctaggtacttgtggttcccatgtctgtgttattcttctgttctatacaccagcattcttttctttcttcgctcatcgttttgggggtcacagtataccactgcatgtgcacattcttcttgccaatctgtatgtggtagtaccaccctctgtcaaccccattatttatggagtgaggactaaacaaattcaggagaggattattcaaatgttttctttgggcaagtcattttgt

SEQ ID NO: 840 - DNA, 735 bp, Mus musculus
  MOR14-7P
atgctacatatgcaggacaacacagaattcctaagcaacttcacatcgcaattaccaaccttcttgttgactggcattcctggcctagagtctgctcacagctggatctccatccctttctgttgtctttatgccactgccctctctggcaacagcatgatcctcttcatcattgtgacccagcatagtctgcatgaacctatgtactatttcctctctgtgctctctgccactgacctaggtttgactttttctacaatgtcaactaccttgagaatcctgtggtttcaggcaaatgaaatcagtctagatttttgcattgttcagatgttttttctccatggattcacatttatagaatctggagtgctagtggctatggcttttgatcgttatgtagcgatctgcaaccctcttagatataccatgattcttactaattctagaatcattcagatgggtttcctagtgataatgcgtgctctgttattaatagtcccactgcttctgctccttaaacctgtctctttctgtaaaaggaataccctctcccactcctactgttatcatccagatgtgattaagttagcatgttcagacactcgagccaatagcatctgtggactagttgatctcattctgaccacagggatagatactccatgcattgtcttatcttatatactgatcattcgctctgtcctcagtatcgcctctctgaagaaaggcacaaga

SEQ ID NO: 841 - DNA, 740 bp, Mus musculus
  MOR225-7P
atggaatgcaagaggaacgtatcagaatttcttcttatggggctatcttccagcagaacactgaagtattttgcttcattttcttcttattctgctactttaccatcttgtcttggaatctgctgatccttttctcaattagatgcagttctctgttcaaccaacctatgtactatttcctcagtcatttagcatctatggacatctgctatacctcctgtgtgacacccaaattgattggggatctgcttgccgaaagaaaaactatctcttatacagactgcatgctacaggtctttgccatgcacttctttggaatgattgaaaccttaatcctgacagtcatggcttttgaccgctgtgtggccatctgcaagcctctccactacatggtcatcatgagcagaaacagatgccatgtttttatctgggcttcctgggttggtggtgttgcccactcctttccccaggttatgatgctagtctgtttgcccttctgtggacccaatgaaatagaccactactactgtgacgttttccctttgctgaaagttgcttgcactgatacctacatcattggtgtcctcatggttgccaattcgggaatggttgcctctgttatctttgttctcttgtttggttcatatgtagttatactgttcacattaaggaattactcagcagaagggagacgcaaagctctttcaacctgtgggtcccacatctctgttgttatttta

SEQ ID NO: 842 - DNA, 657 bp, Mus musculus
  MOR203-5P
tccatctccatcatgggatgtatgttacagctactagcctatggtacttttgcaaccattgactccttcatcttagctgctatggctgtggaccgctatgtggccatctgtaacccactgcgctatcccatagtcatgtcccagagactgtgcattctgctgctggtgggttcttataccatgggcttcctaaatgcttctgtaaacacaagttttacattctcactgaaattctgcaaatccaatgccattaatcactttttctgcgatgagccacccattcttgccctatcatgctccagtattgacttcagtatcatgttactgacagtttttgtggggttcaacctagtgagcactgtacttgttgtcatcttttcctacacatatgtcttgtctgccatcctaaggatgtcttctgctgcaggaaggaaaaaggccttctccacatgtgcttcccacttgactgcagtcaccattttctatgggactctcgcctacatgtatctacaccctcataccaatgactctcaagagcaagaaaaggcagcttctgtattttatggcataattattcccatgttgaaccccttgatctatagtctgagaaaccaagatgtaatagaagccttcaaaaagatagtgaagaaatgctta

SEQ ID NO: 843 - DNA, 937 bp, Mus musculus
  MOR171-28
atggctgaaggcaatcagtccacagtgactgagttcatcctcacagggttaacaaacaaaccagagctgcagctgcccctcttcctcctcttccttggaatctacttgttcacggagctggggaacctgggcatggtcatcttgatctcgattagctcccacctgcacacccccatgtacttcttcctcagcagcctgtccttcattgacctctgttactctactgtcattattcccaaaatgctggtgaactttgtgacagagaagaacatcatctcctaccctgaatgcatgacacagctctactgcttcttagtcttagttatatctgagtgttacatgttgtctgcaatggcgtatgaccgctatgttgccatctgtaaccccttgaggtataatgtcaccatgtcttaccaagtctgtttatggatgataggtggggtgtattgcataggtctcattgaagccacacttcatattgtttgcatgctgcgagtacttttctgcaaggctaatgtagtaaaccacttcttctgtgatcttcttccattgctgcaacttgcttgctccagcacatttgtcaatgaggtagtacttctgtgcctcagtacttttaatttctgtgtgccaatgctgacaattttgagctcttacagctttatcattgccagtaatcctccgcattaaatccactgaaagcagattcaaagccttcagcacctgcagctcccacttcacttctgttgctgtcttctttggttctttgggattcatgtactttcagccatcatcagttagctccgaagatcaagggaaagtgtcctctgtgttttacactactgttgtgcccatgctgaacccgttgatctacagtctgaggaataaggatgtcaaagttgctctaaataagttacttcgaaagaagacatttcatatg

SEQ ID NO: 844 - DNA, 862 bp, Mus musculus
  MOR204-24P
aaccctttcctccccaacttgcttcttggtcatgatgtttgtgcaggaatagaaaccctgactaagacacttctcatcagagtctcttcccagctccatcaccccatgtacttttttctaagcaacttagcttctatagacatagcctattcatcttctgtcacacccaatatgcttgccaacttcctggtaaagcaaaataccatctcctacattggatgttctattcaattcggctcaactgctttttgggggacagttgaatgctttcttctggctgtcatggcttatgatcgctttgtagcaatctgcaaccaactgctttattccacaaaaatgtctacagaagcctgtatccagttggttttaggatcttatataggtggctttcttactgctttatccttcatcctttccttctttttatttatcttctgtggtccaaataggatcaatcattttttctgtgattgctcctttggtggaactctcctgttccgatgtcagtgtctctgtacttgttacctcattttttgttggtttagtcactgtgatcacagtgtttgtcatagccatctcctatatctacatccttatcaccatcctgaagatgcgctccactgagggcagtcacagggccttctccacctgcacctcccacctcactgcagtcactctcttctatggtactgtcacattcatctatgtgatccccaagtccaactactccactgatcagaagaaagtggtctctgtgttctacacggtggttatccccatgctgaaccccattatctatagccttagaaataatcagattaagggtgctttgaaaagactgcttggtaagaaaatattttct

SEQ ID NO: 845 - DNA, 267 bp, Mus musculus
  MOR40-7P
atgtctgcatctctcaaagacttcaatagttccaagttcctggtgtctgagttcatcctgctaggattcccgggcattcacagctggcagcactggctctccctaccattgactttgctctatctctcagcaatagggacaaacgtgctcattctcatcatcatctgtcaggatccatccctgaagcagcccatgtaccttttcttaggtatcctttctctggtggacatgggccttgccaccaccatcatgcctaagatcctggcc

SEQ ID NO: 846 - DNA, 958 bp, Mus musculus
  MOR204-25P
ctagctttcctggagtatggggaccacactacagtgaaagagtgcattttactgggtttaacagatgacccagtctttagagtcatcctcttcagcatcatcctgtgcatttacctggtgactgtgtttggcaacctcagcaccatccttctaatcagagtctcttcccagctccatcaccccatgtacttttttctcagccacttgggttctcctgacataggctaagcatcttctgtcacacctattatgcatgtcaatttcctggtggataaaaatatcattatgaccctagggtgtaatatccaccttggctcaggtgctttctttgggacagttgagtgctttgttctagctgccatggcttatgattgctttgtggcaatctgtagttcactgctttattcaaacaagatgtcctcacaagtctgtgttcagttgcttgtagtaacatacgtaagcagttttcttaatacttcttgcttcaccctttctttcttttctttttacttctgtggaccaaatagaatcaaactctttttctgtgattttactcctttagttgagctctctatcttttgacagtgtttctattcttgttactatttctggtggcactgtcattgtgattacagtgtttattattgctgtctcatacatttacatcttcatcaccattctgaagatgcactccactgggtgtcgccataaagcctttttcacctgcacctcccacctcactacagtcaccctgttctatggaactgtcacattcatctacctgatgccaaaatctagctactccacagaccaaaacaaggtggtgtctgtgttctgcatagtggtgatccccatgttgaatccactcatctacagcctcagaaataatgaaattacagatgctcttaagagacatataggtaggaaaacatgttcttggagaaatctattatgctgt

SEQ ID NO: 847 - DNA, 965 bp, Mus musculus
  MOR204-26P
ggttttcttctggatgggaaccacactgcagtgacagagttcattttattgggtttaacagatgacccagtccttagagtcatcctcttcaccatcatcctgtgtttctacctggtgactgtgtctgggaacctcagcaccatccttctcatcagagtctcttcccagctccatcaccccatgtactttttcctcagccacttggcttctgtagacataggctactcatgtactgtcacacccaatatgcttgtcaacttcctgctggagaggagtacaacctcctacactgaatgtggcatccagcttggctcagctgatttcattgcaccagttgaatgcttccttctggctgccatggcttgtgatcccttcatggcagtctgaaacccactgctttattcaaccaaaatgtccacacaagtctgtgtccagctagttttgggatcttatgtagggggtttcctcccctcatcatcatggcttactttttctctttcctcttctttggaccaaatagaatcaatcatatttttctgcaattttgatcctttggcagaactctcctgttctgatgtcagtgtctctatacttatctcatttttggctgcctccattgctattatcacagggtttgtcatagccttctcctattcctacatcctcatcaccatcctgaagatgcactccactaaaggtcgacacaaggccttctccacctgcacctcccacctcactgcatcactctttattatgaaaccattacattcatttatgtgatgcccaagtccagctactccacaggccagaacaaggtggcatctcaattctacatggtggtgatccccatgttgaatctgctcatatacagccttagtaataatgagattaaaggtgctctgaagagacagcttgatatgaaaacattctcttataataatctgttgttttgtactacaatataa

SEQ ID NO: 848 - DNA, 1011 bp, Mus musculus
  variation (613)...(707): Any nucleotide A, C, G or T
  MOR37-1
atggctcttagcaattctagctggaggcagccccagccccctttcttcctagtaggtgttccaggcttggaggaaagtcagcactggatagcattgcccctgggtatcctttacctctttgctctagtgggcaatgtgactatcatcttcattatctggactgattcatccttacaccaacctatgtacctcttcctggccatgcttgctgctattgacctggtcctggcctcttccactgcacccaaagccctcactgtgctcctggctcatgcccatgagattgggtacattgtatgcctgactcagatgttctttattcatgccttctcctctatggagtcaggcatacttgtagccatggctctggatcgctatgttgccatctgccaccctctgcgtcattccaccatcctgcatccagggattatagggcgcattgggctggtagtactggtgcggggattggtccttcttttcccattccccattctgttgcagaatgttgtcttctgcagagcaactgtcataagccatgcctattgtgagcatatggctgtggtaaaacttgcctgttctgaaaccacagtgaatcgagcttatggtctgtcannnnnnnnnnnnnnnnnnnnnnnnnnnnnnnnnnnnnnnnnnnnnnnnnnnnnnnnnnnnnnnnnnnnnnnnnnnnnnnnnnnnnnnnnnnnnnncattggcatttcctatgccctcatcctccaggcagtgctgaaggtgccagggggtgaagccagacttaaagccttcagtacatgtgggtctcatgtttgtgttattctcatcttctatgtccctggaatgttctccttcctcactcaccgctttggccaccatgttccccatcatgtccatgttctgctggccactctctatctccttgtgccacctgccctgaatcctcttgtttatggggtgaagactcgacagattcgccagcgagtgctcagggtgttctacacaaaagcatcgatttga

SEQ ID NO: 849 - DNA, 618 bp, Mus musculus
  MOR32-8
cacatattcactgcaatggagactgtagtgctggttgccatggcctttgaccgctatgttgccatctgcaatcctctgcggtacagtcagattctcaccaacagaacaataggactcatcctggtggtggtgtttggagtaaatttcattttgctcattcctctggtatttctcatattgaggcttcctttctgtggtcaccatataattcctcacacttactgtgaacacatggggattgctcgtctggcctgtgccaacataaaggtaaacatgatatttgggttgatacttatatcaatggtgcttgccgatgtgcttctaattgccatctcctatatgcggatactacgagcggtcttctgccttccatcccgggatgccaggctcaaagcacttaacacatgtggctcccacatctgtgtcatcctggccttcttcactccagcttttttctcattcatgacacataggtttggcaggaatgttcctgcatacattcatattctcctggctaatctatatgttgttgttcccccagccctgaatcctgtcatctatggggtgaggactaagcagattcgggatcaggttttaagcatcttttggaagaaaaca

SEQ ID NO: 850 - DNA, 862 bp, Mus musculus
  MOR259-3P
atgattccagggcaaaaccaaagttgggtttctgagttcatcctgattggcttctccagtgaccccacgaccaacagcatcctcttcattgtctttcttctcatctacctgagctcagtcctgggcaacgggctcatcatcatgctggtctgcctggacacacagctgcacactcccatgtacttcttcctctctaccctctccctgttggatatgacctttgttaccaccaccatgccccagatgttggtgcatcttcttgctcactctcagaccatctcctttactggctgctggctgcagatgtttatgttcggtggcctgggtataactgagtgcaccttctttgttgtcatggcttatgatcgttatgtggccatttgctatccactgcgctatactgtcatcctcaactggggcctctgcatacggttggcagcagggtcttggatttgtggtttcttttcctctttattgcacactttcttcaccatgagtctgccatattgtgggcccaacagggtcaaccactacttgtgtgaaggtccttcagtgcgtagcttggcttgcatggtatacccacatcattgagatggtggacttggtcttgagtgtctttttggtcgttactccaatctccctcattgtggcctcctacattcgtattgccatggcaattctcaagatcaagtccacagagggccgctgcaaggctttctctacatgtgcctcccacctgactgtggtcacattcttctatgctccagccacttacacttacttgaggcccaactccagttactcccctgagagagacaagcagatctcactcttttacagtgcttttacaccattgctcaac

SEQ ID NO: 851 - DNA, 576 bp, Mus musculus
  MOR150-2
gaccgctatgtggccatttgccaccctctgaggtacacagtcatcatgaactcatgcttctgtagtatacttattgtagtttccttggctattagtgctgtcaatgcactactgctcagtctcatggtgctgcatctgaatttctgcacagaggttgaaatcccacacttcttctgtgaacttgctcagatcataaagcttgcctgctcagatactctcataaataatattttgatttatatctcagctttcatgtttggtggtattcctttctttggaatatttctttcttatactgaaattgtctcctctgttttgaaaattccatcaaggcaaggaaggcataaagcattttccacgtgtggctctcacctgtcagtagtttccttgttttatgggacaggcttaggagtgtacattagctctgcagttactgaatctcccaggaaaacagccgttgcttcagtaatgtactctattgtcactcagatgctgaacccttttatctacagcctgaggaacagagacatgaaggaagctttaaggaagcacgttggaaggatagcttccattgta

SEQ ID NO: 852 - DNA, 940 bp, Mus musculus
  variation (213)...(350): Any nucleotide A, C, G or T
  MOR273-3P
atgatggaatatgagaactacacttttaacagcgacttcatcctcttgggactgttctcttcttcaaagacaagcttaacttttttctcatttatatttttcatttttattatggctataacagaaaatgccctcatgatcctcctaatccacagggattctcgactccataccccaatgtatttacctgcttagtcatctctccttcatggnnnnnnnnnnnnnnnnnnnnnnnnnnnnnnnnnnnnnnnnnnnnnnnnnnnnnnnnnnnnnnnnnnnnnnnnnnnnnnnnnnnnnnnnnnnnnnnnnnnnnnnnnnnnnnnnnnnnnnnnnnnnnnnnnnnnnnnnnnccatgtcctatgatcgatatgtggccatctgccacccacttcgctaccctgtgctgatgagggataactccagtaggctcctggctgcaggctcctggctggtggggatcctcaactccatagtacacacagtttttgcactccactttcccttctgccactcaagagccattgatcactttttctgcgaagtccctgccatgttgaaattgtcatgtatagacacaacacactatgaacgaggcgtttatgtgagtggcattatttttctgctgatcccattttccatgatctctatatcttatgtgcaaattctcctcactgtattccaaatgcagtcatcaggggcccggcaaaagtccttttccacctgttccttccacatggttgttgtcataatgtactatgggccattcatttttacatatatgagacctcgctcataccacactccagggcaggataaatttttggcaatattctacaccatcctgacacccacactcaaccccataatctacagctttcgtaataaagatgtccttatggctgtgaaaaacatcgtccaaagtaattttttgaataaaaaa

SEQ ID NO: 853 - DNA, 405 bp, Mus musculus
  MOR259-4P
atgtggatgtttccaaagcagaaccaaagttgggtttctgagttcatcctgcttggcttctccagtgtccccacaaccaacagcatcctcttcattgtcttccttctcgtctacctgagctcagtcctgggcaacgggctcatcatcatgctggtctgcctggacacacagctgcacactcctatgtactttttcctctgtaccctctccctgttggatatgagctatgtcaccaccaccatgccccagatgttggtgcatcttcttgctcattctcagaccatctcctttgttggctgctggctgcagatgtatatgttcagtgccctgggtatagctgagagcatcctctttgttgtgatggcttatgaccggtatgtggccatttgctatccactgcgctat

SEQ ID NO: 854 - DNA, 649 bp, Mus musculus
  MOR202-22P
tgccttgctcaaatgttcttcatccatagtttcactgccatggtaatctggcttcttcttggccatggccattgatcgctatgtggccatttgtgacccactacgtcataccactattctcaccaacagtcgcatcgccaagatgggggcagttgtggtgctgcgtggggtaggctttttctccccacaccccatcctgctcaagcagctgccctactgcagaactcgaatcattgcacacacctactgtgagttcatagctgtggtgaagctggcatgtgtggacacaggagctaccaagcgttatagcctcagtgtggcctctgtcattggttcttgtgatggcttcttcattgccctctcttacgttcttatcctccgtgctgtttttcgtcttccatctcgagaagcaagtcttaaagccttaggaacctgtggctcccatgtctgtgtaatccttgttttctattctacagccgtctttacattcctgacccaccgttttggccacaatgtggccccccaaattcatatcttcatagccaatatgtaccttctggtaccgccctttctaaaccccattgtttatggtattagaacaaagaaaattagagagtacgttcttagttttcttagagtaaaattttcc

SEQ ID NO: 855 - DNA, 934 bp, Mus musculus
  MOR239-7
atggaaaactataccagggtgaaagaacttattttccttggcctgacccaaagtcaagaagtgagcatggtgctctttcttttccttctcctggtgtatgtgacaactctgctggggaaccttctcatcatggtcacagtgacctgtgagtctcgccttcacacccccatgtatttcttgctcaggaatttgtctgttgctgatatctgcttttcctccatcactgcccccaaggttctggtggaccttctctcagacagaaagaccatctctttcaatggctgtctcactcagatgttcttcttccaccttattgggggagtggatgtgttttctctgtctgtgatggctctagatcgatatgtggccatctctaagcccttgcactatgtgaccatcatgagcagaggccgttgcattgggttaatagtggcctcctgggtgggggggctttgcccactccatagtgcagatttctctcttgctgacacttccattctgtggacccaatgttcttgatactttctactgtgatgtcccccaggtcatcaaacttgcctgcacagacatctttgttcttgagctgctgatgatttccaataatggaatgctcaccacactatggtttttcttgttactggtgtcctacatggtcatattattattgctgaagtctcaatcaggagagggcaagaagaaagccatatctacctgcacctcccacatcactgtgatcaccctgcactttgtgccctgcatctatgtctatgccaggcccttcactgccctccccacggataaagccatctctgtcacctttacagtcatctcccctctgttgaaccccttgatctacactctaaggaaccaggaaatgaagtcagccatgaggagactcaggaaaagacttggaccttcttattggatagagagg

SEQ ID NO: 856 - DNA, 934 bp, Mus musculus
  variation (558)...(577): Any nucleotide A, C, G or T
  MOR198-1P
atgccccacacaaacagcactaaaatcacagaattcattttactggggctcacagatcgcccagaactccagcctctcctctttgtcctgtttctgtttatttaccttgtcaccctcttaggcaacatgggcttgatggctctgattagactggattcccgccttcacaagcctatgtacttcttcctcagtaacttggcatttgtggatctgtgttatacctcaacagccaccccacagatgttgaccaatttcttatcagaaaagaagacaatttccttcattggctgctttatccagtgctaccttttcattgcacttctccttacagagttttatatgctggcagccatggcctatgaccgctatgtggccatatgcaaccctctgcgttacagtgtgaaaatgtccaggcgagtctgcatctgcttggccatgtgtccttatatctatggcttctcagatggactattccaaaccatcttgaccttcagtatgaccttctgtaaatccaatgtcatcaaccacttctactgtgctgacccaccacttattaannnnnnnnnnnnnnnnnnnntctctccaactcccttacaatctcctggtgtcctatgccttcattattgctgccatcttaaggatcaaatcagctgaaggaagacgcaaggcattctctacttgtggttcccacatgatggctgtcacattgttttatgggacactcttctgcatgtatgtaagaccacccactgacaagactgttgaagaatccaaaataatagctgtcttctacacctttgtaagtcctctgctgaatccattgatctacagtctgaggaataaagatgtaaagcaggccttgaaaacaatactcaggcaaaacgtcatcaggacagcattgatgcgtccaccttccaacaaactgcaccaataa

SEQ ID NO: 857 - DNA, 726 bp, Mus musculus
  MOR127-5P
atggacggaggcaaccagagtggggactctgagttcctcctcctgggactctcggaggttcctgagcatcagcgcatcctattctggaccttcctgtccatgtacctggtcacagtggtggggaacgtgctcatcatcctggccattggctctgactcgcacctgcacactcccatgtatttcttcctggccaacctctccttcactgacctcttctttgtcaccaacactatccccaagatgctggtgagccttcaatcccagaacaaagctatctcctatccaggatgtctgacacagctcttcttcctggtgtctttggtagccttggacaatctcatcctggctgtaatggcatatgaccgttatgtggccatctgtcaccccctccattacactacagccatgagtcccaagctctgtatcttacttctcatcttgtgctgggccctatctatcctttatggcctcatccacaccctcctcatgaccagagtaaccttctgtgggtctcggaaaatccactacatcttctgcgaaatgtatgtcctgctgaggcttgcatgctctaacacccacatcaatcacatgatgctgatcgccacgggctgcttcgtcttccttgttccttttggattcatgatcatgtcctatatctgcattgtcagagctatcctcaaaattccttcagcctctaacaagtacaaagccttttccacctggtgc

SEQ ID NO: 858 - DNA, 1055 bp, Mus musculus
  variation (691)...(832): Any nucleotide A, C, G or T
  MOR0-2P
atggacatccctagcaataacaccataccccgtggctttctccttcaaggtttttttgagtttccacatctgaagccccttctcttcctggtgctgctggccgtgcacctggccactctgagtggtaacctgctcatcctggtggctgtgatctccgtgccaagcaggccacccatgctgctcttcctttgccagttgtcagccattgaactctgctacacgctagtggtggtgccccgttctctagctgacctgagcatgcctggccatggcaggggcagtcccatctcattcttgggctgtgctgtccaaatgcagatgtttgtggcactgggtggggctgagtgctttttgctggcagccatggcctatgaccgctacgtggccatctgccaccccctgcgatatgcatctatagtgaccccaggtctatgtgcacgcctggccctggcctgctgccttggaggactagctgtatccgtggggctaacggtggcagtgttccacctgcctttctgtggctcccgcctgctggtgcatttcttctgcgacatcaccgcactgctgcacttggcctgtacacggagctatgtggatgaactgcccttgctaggagcctgcctggtgctgctgttgctgccctcaatgctcattttgacctcctatggggccattgcctctgccctgcgcnnnnnnnnnnnnnnnnnnnnnnnnnnnnnnnnnnnnnnnnnnnnnnnnnnnnnnnnnnnnnnnnnnnnnnnnnnnnnnnnnnnnnnnnnnnnnnnnnnnnnnnnnnnnnnnnnnnnnnnnnnnnnnnnnnnnnnnnnnnnnnctgcgcctcacacctggctgtcaccttcctgcattatggttgtgccaccttcatgtatgtgcggccaaaatccagttactcccctcgactggatcgcacactagcgctggtttataccaacgtcacaccacttctatatcctcttatctacagcctgcgcaaccgggagatcacttctgccattcacagggtcctggggttccgtggatcagggtctgtgtga

SEQ ID NO: 859 - DNA, 913 bp, Mus musculus
  variation (597)...(667): Any nucleotide A, C, G or T
  MOR111-8P
atgagaaaccacactgtgatcacagagtttgtgctgttaggtatatcagacacaccagaacttcaacttgtacttttcatctttttattaataacttacatattaagtgtcactggaaacctgaccatcatcatcctcaccttgctagactctcgtttaaagactcctatgtatttctttctccggaatttttccttcttagaaattacattcaccagtgtttcaattcccagatttttggggtcaataattactaaagtcaagacaatttcctataacaactgtctggctcagttatatttcttcatctccatgggggtgtctgagttctttcttctaactgctatgtcttatgaccgttatgttgccatctgcaagccactgcactacaccctcatcatgaatcagaaagtctgcacccttcttgtcctcgcctcatggctggcaggattcctgaccatcttcccaccattaatgttggtcctcaagctggacttctgtgcttctaatgtcattgatcacttctcctgtgactacttccccattctacagctctcctgctcagatccaaggagtttagagatgattggcttttannnnnnnnnnnnnnnnnnnnnnnnnnnnnnnnnnnnnnnnnnnnnnnnnnnnnnnnnnnnnnnnnnnnnnncagaggaaaaaggctttctccacttgttcctctcatatgattgtcatctccatgtcctatggaagttgcatttttatctatgtgaaatcttctgcaaatgaaagggcatcactgaccaaagcagtagctgttctcaatacttcaattgcccctatgttgaacccttttatttatacattaaggaaccagcaagtaaaacaagctttcaaagacttgatttacaaagtactgttgtatagaagcaaa

SEQ ID NO: 860 - DNA, 989 bp, Mus musculus
  variation (627)...(646): Any nucleotide A, C, G or T
  MOR211-4P
atggccaagaataacattaccacagtaacggaattcattctaataggctttaatgaccaccccaagtgggagattccactatttctggtatttcttagcttttatcttgtcaccatgctgggaaacttgggcatggtcattcttatacatgtagatgtccaactccacatcccaatgtacttctttctgagccatctctctgtgttggatgcctgctatacctcagtcatcacccctcagatactggcaacgctggctacaggtaaaacagtcatttcctatagatgttgtgctgcccagttcttcttcttcactatctgtgcagctacagaatgtttcctgctgtctgtgatggcctatgatcgctatgttgctattagcaatccactgctctacactgtggccatgggccctagaaaatgttggagtttagtagtaggagcatatgtctgtggaatgtgtggggccattctgcgtaccacatgcaccttctctctctccttctgtgaaaataatcagatcaatttcttcttttgtgacctcccacctctgctgaagctggcctgtagtgacacaacaaatattgaaattatcattgtcttctttggggaattttgtaatttcggnnnnnnnnnnnnnnnnnnnntgggaattttgtaatttcggccaatgccttagtcatcctcatttcctacctgctcatcatcaaagctgtcatgagaatgaagtcttcaggtagaagagcaaagactttctcaacatgtgtctcccacctcactgctgtggctcttttatttgggacactcatctttatgtacatacgtagtggttcaaagaaatccctggaagaagataaggttgtgtctgtcttctacactgtggtcattcccatgctgaacccacttgtctacagcctaagaaacaaggatgtcaaggctgcattcaagaaggttactggtaaatggcaggtctcccacagcatacaatac

SEQ ID NO: 861 - DNA, 907 bp, Mus musculus
  variation (286)...(313): Any nucleotide A, C, G or T
  MOR108-2
atgaaaaatcgaacatctgtgagtgagtttattcttctgggattgacaaatgacccaaagctaaacattttgatttttgtatttttatttatcacttatattttgagcattactggaaatctgtaccattattaccctcactctgatagattcacacctcaagacacccatgtacttttttcttcgaaatttctcattcctagaaatctcatttaccacagtttccattcctcggttccttgtgagcattgtaactggggatatgaccatctcctatagctcttgnnnnnnnnnnnnnnnnnnnnnnnnnnnnactgctatgtcctatgaccgctatgtggctatctgtaagcccttgcattacaccacaataatgagcagcagggtctgcatgcagcttattgtgagctcttggctggctggatttctcatcatctttccacctgtgatcatgggccttcaactggatttctgtgactccaacattattgaccatttcacctgtgactcctcccccttgctgctcatctcttgcacagacacagccttcctagagctctttgcattcttcctggcagtattaaccctcattgtaaccttaacattagtgattctgtcctattcattcatccttaggacaattctaagaatcccctctgctgagcaaaggaaaaaggccttttctacctgttcctctcacatgattgttgtgtccatttcctatggaagctgtatatttatgtatgtcaaaacttcagcaaaggaaggagtgactttgactaagggtatagcagtgctcaacacctctgttgccccaatgctgaatcctttcatttacacacttagaaacaaacaagtaaaagaagcatttaagactttgatcaaaaaacgtttttcaaacaaaatt

SEQ ID NO: 862 - DNA, 724 bp, Mus musculus
  variation (347)...(366): Any nucleotide A, C, G or T
  MOR0-3P
atgacaatccataataataggagcgtttctcacccagatacatttttcctcattgggatcccaggtctggaggaaatccatgcctggatttctctgcctttctgctgtatttatcttgtggccctaatggtaaataccatgatcctggtagttatcaagacagagcgttctctccgagagcccatgttctactttctggccatcctttcttcagtcgacttggctctttctacaacctctgtgccccgtatgcttggcatattctggtttgatgcccatgaaataaacttcggtggctgtgtggctcagatgtttttgatccatgcctttactggcatggaggctgnnnnnnnnnnnnnnnnnnnnagacatccatatcaacgctgtgtatggcctttttgtggtctctctctttcttttgaacttggtacttattggcatctcatatgggtacattcttcgtgctgtgtttcgcctcccatctcaggatgcacggttaaaagccctcagcacatgtggttcccatgttgctgttctctgtgttttctacatcccatcagtcttctctttcctcactcatcgatttggacacaacattccacactacattcacattcttgttgccaacctctatttggtcattcctccctccctcaatcccatcatttacagtgtgagaacaaagcagataagagaacatgttctccacatattcactaaaagg

SEQ ID NO: 863 - DNA, 720 bp, Mus musculus
  MOR8-5
ttgtccttctcttctcttcctaccatgcttaaaatcttctttttcaatgccatggcaatctcacccaatgcctgttttgcccaagagttctttatccatggcttcactgtcatggagtcctctgtgcttctgattatgtctttggaccgctttcttgccattcacaaccctttaagatacagttctatcctcaatggccgcagagttgctaaaatagggctaattttagccttcaggagcacagttttggtgcttccattccctttcacactaaggaaactgaaatactgtcacaagaatctcctctctcactcatactgccttcatcaagatgtcatgaaactggcctgctctgataacaagatcaatttcatctatggcttctttgtggctctctgtaccatgctggactttgccttgattcttatgtcttatgtgctgatcttgaagacagttctcagtattgcatctctagcagaaaggcttaaggctctaaatacctgtgtctcccacatctgtgctgtgctcatcttctatgtgcccatcatcaccctggctgccatacatcgctttgccaaacacaaaagtcccctacttgtaatccttattgcagatatgttcttgttggtgccacccctgatgaaccccattgtgtactgtataaagactcggcaaatccgggagaaggtcttgggaaagttggttaacctatgtgtgaga

SEQ ID NO: 864 - DNA, 846 bp, Mus musculus
  variation (436)...(742): Any nucleotide A, C, G or T
  MOR111-9P
atggaaaaccgcacagtacccacagaattcattttattgggactgtcagatgaccctgggcttcagattgtgatctttctctttttaattctcatgtacatactaagcatcactggaaacttgaccatcatcaccctcaccttggtagaccctcatctacaaacccccatgtatttcttcctcaggaacttctctgttttagaaataacctttacaactgtctgtatccctagattcctaagcacaattgttaccagggacaaaactatttcctacaatagttgcacagctcaattgtttttcttcatcttcttgggcatcactgaattttaccttctaacggctatgtcttatgatcgctatgtggccatctgcaaaccactgcactacacaaccatcatgaacagaagagtctgcatattgcggtcttttctgnnnnnnnnnnnnnnnnnnnnnnnnnnnnnnnnnnnnnnnnnnnnnnnnnnnnnnnnnnnnnnnnnnnnnnnnnnnnnnnnnnnnnnnnnnnnnnnnnnnnnnnnnnnnnnnnnnnnnnnnnnnnnnnnnnnnnnnnnnnnnnnnnnnnnnnnnnnnnnnnnnnnnnnnnnnnnnnnnnnnnnnnnnnnnnnnnnnnnnnnnnnnnnnnnnnnnnnnnnnnnnnnnnnnnnnnnnnnnnnnnnnnnnnnnnnnnnnnnnnnnnnnnnnnnnnnnnnnnnnnnnnnnnnnnnnnnnnnnnnnnnnnnnntggctcctatgatgaatccatttatctacactctgaggaatcaacaagtgaagcaagcctttaaggacgccatccaaaaagtagtgcttttctctggcaaatga

SEQ ID NO: 865 - DNA, 420 bp, Mus musculus
  MOR32-9P
atgtccctgtataacatcacagaagtccatccttcttcgttcctcctgctgggcatcccagggctagaatatgcacacatctggattggatttcccttttgttttctctatctcattgcaattctgggaaatgctgctgttttatttgtgatccaaactgaacacagtcttcatgagcccatgtactacttcctagccatgctggattccattgacctgggactgaccacagccaccatccccaaaatgctgggcatcttctggttcaatctcagggaaatatcttttggaggttgcctttctcaaatgttcttcatccacttcttcacggtcatggaaagcattatgttgttggccatgggctttgaccgctacgttgccatttgtaagccccttcaatatactgtcattctaaccaac

SEQ ID NO: 866 - DNA, 914 bp, Mus musculus
  MOR260-7
atgggtgaagacaacagaacctctgtgacagaattcatcttcctgggcctctcacaggacccacagacacaagtcctgctcttcttcctcttcctcttcatctacctgctcactgtgctgggaaacctgctgatcatcgtgctcatccactcagaccccagactccacacccccatgtacttagaaacctgtcctttgcagatctctgcttttctactaccacagtgccccaagtgcttgtccacttcctggtgaagaggaagaccatttcttttgctggttgctccatacaattagtcgtgttgcttctagtagggtgtacagattgtgcacttctagcagtgatgtcctatgaccgctatgtggctgtctgcaagcctcttcactactccaccatcatgacacactgggtatgtgttcagctggctgcagggtcctgggccagtggtgcatttgtgtccctggtagatgctacattcacattgcgtcttccttatcgaggaaacaatgtcattaaccactttttctgtgaacctcctgccctcctgaagcttgcttcggcagatacctacagtacagaaatggcaatctttgcaatgggtgtggtaatcctcctagcacctgtctccctcatcctcatctcctactggaacatcatctgcactgtgattcagatgcagtctggagagggtaggctcaaggtcttctctacctgtggctcccacctcattgttgttggtctcttctatggctcagcaatatttgcctacatgagaccaaattccaagataatgaacgaaagagataaaatgatttcagtgttctactcagcagtgaccccaatgctgaaccccatcatttacagcctgagaaacaaggatgtgaaaggtgctctcaggagaataacttcaaga

SEQ ID NO: 867 - DNA, 1064 bp, Mus musculus
  variation (300)...(480): Any nucleotide A, C, G or T
  MOR260-8P
atgggtgaagacaacagaacctctgtgacagaattcatcttcctgggcctctcacaggacccacagacccaagtcctgctcttcttcctcttcctcttcatctacctgctcactgtgctgggaaacttgctgatcatcgtgctcatccactcagaccccagactccacacccccatgtactttttccttagaaacctgtcctttgcagatctctgcttttctactaccacagtgccccaggtgcttgtccacttcctggtgaagaggaagaccatttcttttgctggatgttctacacannnnnnnnnnnnnnnnnnnnnnnnnnnnnnnnnnnnnnnnnnnnnnnnnnnnnnnnnnnnnnnnnnnnnnnnnnnnnnnnnnnnnnnnnnnnnnnnnnnnnnnnnnnnnnnnnnnnnnnnnnnnnnnnnnnnnnnnnnnnnnnnnnnnnnnnnnnnnnnnnnnnnnnnnnnnnnnnnnnnncactgctggcagtgatgtcctatgaccgatatgtggctgtctgcaaacctctgcactactccaccatcatgacacactgggtatgtgttcagctggctgcagggtcctgggccagtggtgcacttgtgtccctggtggataccacattcacattacgtcttccttatcgaggaaacaatgtcattaaccactttttctgtgaacctcctgccctcctgaagctggcatcggcagatacatacagcacagagatggcgatctttgcaatgggtgtggtaatcctcctagcacctgtctccctcatcctcacctcctactggaacatcatctccactgtaatccagatgcagtctggggaaggaaggctcaaggtcttctccacctgtggctcccacctcattgttgttgttctcttctacggctcagcaatatttgcctacatgaggcccaactctaagataatgaatgaaaaggataaaatgatttcggtgttctattcagcagtgaccccgatgctgaaccccatcatttacagcctgagaaacaaggatgtgaaaggggctctcaggagaataactttaaaa

SEQ ID NO: 868 - DNA, 579 bp, Mus musculus
  MOR13-5
gatcactatgtagctatatgcaatccactgcgctatgccacggtgctcaccaatgctcgcattgtggcaatgggcctgggaacagtcctccgtagctttgttctcattgttgtttttccagtgcttttgcacaggctgcccttctgccaccctcagaacatcctctcccatgcttactgtctacatgtggacatgattaaactggcatgtactgatgtttccctcaatagccactatgggttgtccatcgtgttgctcacctttggcctggactctgcactcattctcatctcttatgtgcttatcctgcgatctgtgctggccattgcgtctcgggaggagcgtctgaagacactcaacacatgtgtgtcccacatcttggctgtgctcatattctatgtgcccatggtcagtgtgtctattgtgcatcgctttggggctggcctgcctcatgcagtccatatcctcatgtctattctctatctctttgtgcctcctatgctaaatcctatcatctattccattaagacaaaggagatacgccggagactactcaagatgctcttcagagtcaagttg

SEQ ID NO: 869 - DNA, 938 bp, Mus musculus
  MOR12-2P
ctgttggtgtcattggagcagagaataatgaaattcttgactggcattccaggacttgagacccaacatggttggctctctattcccattttcatcatgtacatggttgccattgtaggccacagcctaatcatggctgcagtgcaacaagtctcagtttttcatgagccaatgtatctgttcttctacatgttggccatcaatgaggtgggagtctctgagtccacaatgcccactgttaggagcagtctttggtttgtgccaacagaattgaccttgatggctgtttggcacaaatgctcttcattcacactttctctggcatggggtcaggagtcctgttgaccatgagttatgaagactttgtaaccatctataatcctctgcgccatacagcctttctaactctgcctcggatcatatctatgggtctgggtattacactaaagagtgttacactcatggccccacttcaaattcttttaaaacaacgaccatattgtcacataaatattctctcccattcttatggcctccatgcagacttgatccaactgccttgtgcagatactaggttgaacagcatcttgaggttgaccattgtcctggccacttttgggctggactcattatttattgtggtctcttatgggctcattctttacacagtgatgggtattgcttctggtgagggtcggaagaaggccctcaacacatgtgtgtcacacatctgtgcagtgcttatatattatgtgcctatgattggtgtgtctatgatgcatcgtgttgccaagcatgcatcacctgtggttcacaccctcatgttgagcatctatctgtttgtgccaccagtgctcaatcctatcatatacagtgtgaagacccgtccaatccaacagggaattgccaacttgttctcgtgcaagaagggatcgatc

SEQ ID NO: 870 - DNA, 579 bp, Mus musculus
  MOR22-4P
cgttatgtggcaatctgtgatcctctaagacatgcatccatctttacccagcgactcctcactcaaataggagtaggagtcacactcagagcagccctgtttgtagctccatgtctctttctcatcaaatgcaggttgaaattctactggaccactgttgtttctcattcatactgtgagcatatggccattgtgaagctggcagcagaagatgttcatgtcaacaagatctatggtctgtttgtggccttcagtatacttggactagacataattttcatcacactttcctacattagaatatttataactgtcttcaagctccctcaaaaggaagcaagactcaaagcctttaatacatgtattgcccatatttgtgtcttcttggagttttaccttctggccttcttctccttttttacacataggtttggctaccatgttccatcttacattcacattctcctgtccaacctttacctacttgtcccacctttgctcaatcctattgtttatggtgtgaagaccaaacagattcgagatcaagtgtccaaaattttgtattgtaattattcttat

SEQ ID NO: 871 - DNA, 665 bp, Mus musculus
  MOR12-3P
ccaataactaaggtcatttatgcttcgaacctgccctttgtgctcagtaactttctgcttggtgctaataaaatctgttttgaaacctgccttttaaaaatgttctccatacattcattttccatcatggaatcaggagttcttctagccatgtctgtggatcgctttgttgccatctataaaccactccgataccccgttaaactgactctgccccgcattgctggtaccagggttacacttggtctaaagagtctgttgctcatgttcctcctgccttttctcctaaagcgtctgcctttctgtggtcacaatgtgctttcccattcctactgtctgcactcagatctaatccaacttccctgtggggacactcgtcccaacagcattctggggctccgcatcgtgacttctacttttgggctggactcactgctcattgttgtcccttatgtgctgatcctgtccatggtgagtttgtaatttaggcttgtgcttgtgtgagtagattagcggagaggggagaagtaagagcatgcattcatgaatgagttaaaaatctcccttgagaagtccttcctattctccctgtccaggttgcttctgtagtgctgtactggcccagacaacattctgctaggaaagtggtttccaatctgatgaca

SEQ ID NO: 872 - DNA, 921 bp, Mus musculus
  MOR14-8P
atgccaatcttctataactccacctctcctacttttctcttgactggtgtccctggattggaatgggctcatccttggatctccatccccttctgctgcctctatttcactgcactatctggaaattctttgatcctgttcttagtccttactgaaccaactctccaagagcccatgtactatttcctctctatgttgtcctccacggacattggtctctgcatctctacaatcgtgacagtgctggggatattctggctcaatgcccgggagatcagcttcagtgcctgcttgtcacagatgttcttcattcatctcttcacattcatggaatcctcagtgctgttggctatggcctttgatcgttttgtagccatctcaaacccctagagatatgctgccattctaactcatgcaaggattgcacaaattggtctggcaatcattaccaaagcaactgtcattttgaccccaccagtcctgcttcttaagcgcctatcattttgccgtagccgtgtgctccatcactcgtattgcttccacccagatgtgatgaagctttcatgctcagacacaaagatcaacagtgcatttggactaactgcaattatctctactgctggagtggattctatctttatcctactctcttatgccctgatcattcgctcagttctcagcatcgcatcccctagggagaggaagaaggctttcagcacctgcatttctcatgtcactgccgtggccatcttctacatccccttgatcagcctgtcgtttgtccacaggtttggaaaacacgccctgccctatgtgcccactctcattgcaaacgtgtacttgctcattccccctgtgatgaaccccatcatctacagtgtgaaacaaagctgatccagagagctattctcagactcgtat

SEQ ID NO: 873 - DNA, 699 bp, Mus musculus
  MOR32-10
accatccctaagatgcttgggatcttctggtttagcttcagggtaatactctttggtgcctgcctcacacagatgttttttatccacaacttcacaggcatggagtcagcagtcctcttggcaatggcttatgaccgctatgtggccatctgcaacccacttcgatatagcaccatcctcaccaacaaggctgttttcatgattggtctgggtgtgctagtgagatcatttctttctgtcatcccatttgtatttctcatactacggttgcccttctgtgggaataatgtcattcctcacacctactgtgagcatatgggtcttgctcgtctgtcttgtgccaatatcaaggtcaatataatctatggtctgggtgctatttcaatcctgttttttgacattatagccatcgctctttcttatgcacagatactccgtgcagttttccgtctcccttctcgggaagcccgaatcaagtccctcagcacttgtggttctcatgtctgtgtcatccttgccttctacacaccagccctcttttcctttatgacacaccgctttggtaggaatgtgcctcgctatatacatatacttctggccaacctttatgttgtagtgccaccaatgcttaatcctgtcatatatggggtacgaaccaaacaaatctatgaccgtgtgaagaaaatatttttacaaaaa

SEQ ID NO: 874 - DNA, 588 bp, Mus musculus
  MOR171-29P
atgttccccctcaatgacacacagactcttaaattcctcctcatcgggatccctggactacagaagagccacatctgggtgtccattcctttcccctttgtgtaccttctctctttcctgggtaacgttatagtcctcttttttatcaagacagaacaaagcctccacaagcccatgtatttcttcctttccatgctctccatctctgacctggggctgtccctctcttccttgcccaccaccttggggttattcttgcttggaattcatgaaattcatgcagctgcatgctttgcccaggagtttttcatccacctgttcacagtcactgaagcttcggtgctgtctgtaatggcatttgaccgatacgtggccattcacagccctttgaaatacagcaccatcctaaccagctccagagttatcaaaatcggggtctctctgacttccaagaacgttcttttcatccttccactgccctttctcttgcaaagactgaactactgtcactgaaacctgctctcacactcctactgtctccatcaggatgtcatgaagcttgcctgttctgacaatagtgtagtatct

SEQ ID NO: 875 - DNA, 825 bp, Mus musculus
  MOR8-6P
ttgagcataaattattttttttggcctcaggccagccttttcatttttatttttatttttatttttattaacaacagggaggagatgtagtctcccctcccccagcctaaaacctgcttgctcaggggtggagcttcctgctcaatcattctgccatgcctactgctggaacctgctgctttgcggttccgaagccatcacgtgatcaccctgctactggactccaagattatttggcagaattgggcccctcccccttcctttataactgagtgtcgaaatagtaaaaattgaaccttgagcagagagctttgtcttggttccttccttatctcacgcagcccagcccagcccctcttctcttccaggtttccaaaatgccttaccaggctagaacccaggttgtgatctactggccagacacaacacaatagaatcaatgttgtctatggattatgtgctgcactttctactatgttggatttggtatttattatcttctcctacataatgatcttaaagacagttttggggattggaacccccagagagcagttcaaggctctcaacacctgcttttctcacatttgtcctgtgctcatcttctatgtgcccatgctgagtgcagccatgctccaccattttgccaagaatgtgtttcctctaacccacatcctcatggctgatgttttcctcctggtaccacccctgatgaatcccattgtatattgtgtgaaaacctgtcaaatccgagaaaagattttgaggaaactttgttcaaaaaagaagctgatccaaggaagaagaaagcaaataaaggtgtag

SEQ ID NO: 876 - DNA, 857 bp, Mus musculus
  MOR30-4P
atgacgctttctctcatgttggcttcaaggaacagctcttcccactctacatttttcatcttgcttgcaatcccaggactggagaattaccaattctgagttgtctttctattctgtgtcatgtatattgtggcagttactggaaataccaccattcttcacataatccatattgaccacaccctacatgagcccatgtatctctttctggccatgctggctaccactgacctggtcctgtcctcctccacacaaccaaaatgctggccatactttggtttcacgatcacagattgaatatcatgcctgcctcatccaggtgttcttcatacatgccttttcttctgtggagtctggggtgctcatgaccatggccttggaccgttatgtggctatctgcttcccactccgacattccagcatcctgaccacatctgcagtcatcaaactaggggctgttgtgatggtgagagggctgctgtgggtgagccccttctgcttcatggtctccagaatgcccttctgccctaacaaggtcattagccagtcctactgtgatcacatggctgtattcaagttgatatgtgctgataccagagtaaatcatgagtatggactctttgtggctttctctgtggttggctttgacataattgtcatcagtgtatcttaatgtgatgattctgagagctgtgttgaggttgccctcaggtgaagctcgcctcaaagcttttggtacatgtgcttctcatattggtgtcatcttaaccttatatatcccagcccttttcaccttcctcacccacctctttggccaccatgtacccttagttgtccacatcatatttgccaatgta

SEQ ID NO: 877 - DNA, 959 bp, Mus musculus
  variation (328)...(740): Any nucleotide A, C, G or T
  MOR24-1P
atgttaacatacaataaaactaatgtccatccctcaaccttcattctcattggcattcctgggttggaggcagcacacatgtggatttccatccctttttgcatgggctacattttggcattagtgggaaacagttcacttctgttcatcatcaagacagactccagcctccatgagccaatgtacctctttctctgtatgttggcagtggctgaccttgtagtgtgcactacagctgttcccaaacttctcagtctcttctggtttcacgatgggagagattcgctttgaagcttgcctcactcaagtatttctgattcactcttgnnnnnnnnnnnnnnnnnnnnnnnnnnnnnnnnnnnnnnnnnnnnnnnnnnnnnnnnnnnnnnnnnnnnnnnnnnnnnnnnnnnnnnnnnnnnnnnnnnnnnnnnnnnnnnnnnnnnnnnnnnnnnnnnnnnnnnnnnnnnnnnnnnnnnnnnnnnnnnnnnnnnnnnnnnnnnnnnnnnnnnnnnnnnnnnnnnnnnnnnnnnnnnnnnnnnnnnnnnnnnnnnnnnnnnnnnnnnnnnnnnnnnnnnnnnnnnnnnnnnnnnnnnnnnnnnnnnnnnnnnnnnnnnnnnnnnnnnnnnnnnnnnnnnnnnnnnnnnnnnnnnnnnnnnnnnnnnnnnnnnnnnnnnnnnnnnnnnnnnnnnnnnnnnnnnnnnnnnnnnnnnnnnnnnnnnnnnnnnnnnnnnnnnnnnnnnacctgtggctcacatgtctgtgtcatcttagtgttctacaccccagccttcttctccttccttacccataggtttgggcacaaagtggctccacatgtacacatacttgttgccaatatgtatcttcttgtaccacccatgttagaccccattatttatggtgtaagaaccaagaagattagagacaggttccttaaattgtttcttttccaaagagtc

SEQ ID NO: 878 - DNA, 1081 bp, Mus musculus
  MOR0-4P
atgccatccttcaaccagagcagtgcccaacaccattcattcttcttccttcctggcattcctggtcttgagctctctcacaactggacttctatgtctttctgtatgccatcactgtctctgggaatggcatcatcctctttgtcaccattactgagtcaagcctgcctggacccatgcactacttcctgtccatgctgtccttcacagacctgggtctttgcctttccctgctagtcaccatgttggccaacatctggattgttgtttgagaaattagacttcttaaaacaatatttaatttttttgaaaatttgtatatttatacaatgccatttgatcacatgcatttagcactacctttttctgacatcccttagtactctacttactcctaagtttggaaagaatctaagagatggatgaggaggaatgttgtggtgacttctggacaggacatgctgttatacatatcaactcatagggagtatggttatgcacaaaacttgcaatatgaatgggaaaagagctgcaaggaagagaagtcagctcaatgcctacattggccaaatgttatttatgtcttcatattcatggactcttcagttctcttagtgatagcctttgaatacttcactgtcatctgcgattcactggggtgtgccgtgatctcaacccattcacacttattacagtgggctttgcacatgtagccatgaggaccacagctcctgttcttttactcctgctcttcaagcatctatgttttttgctgtagacacatgcatattcagtattaagttctgatcatccactctgtgctctgcagtgtatcgagtgaggggtggtaaaaggtccttggtgcttgcttgtcccatctcagtgctgccaccatctcctacagcaacataatctgtttgtctggtgcagagatttaggaagcatgatcttccctttctgtacatttccatggttggtgtttgtctctcatccttcataaatgaatcttataatttaacatcataatagacatgaaaattaaaagcccttggtaaaattttccttcacaagctattttagg

SEQ ID NO: 879 - DNA, 825 bp, Mus musculus
  variation (487)...(593): Any nucleotide A, C, G or T
  MOR4-3P
atgtctattttcttgatgtcaaacttaagtacctctagatttgttctcactggatttcctggcctggaattctactacatcttgcttgccattcctttctcaaccgtctatgcaatggtgttcctgggaaactgcatgatacttcatgtgatccgaacagagtcaagcctgcaccagcccatgttctattttctggccatgctagccctcacagacctatgcatggggctgtccactgtgcacacagtgctgggcatcctttggggcttccttcaagagatcagccttgatgcctgcattgcacagtcttacttcatccatggtttgtccatcatggagtcctccttgccatgtcctttgatcgctacattgccatttgcaaccctctacgctattcctccatcctaaccaatgacagaatcctgaaaatcggagtggccatcttatggtaaggagttctatgctcattcctccagttattatccgnnnnnnnnnnnnnnnnnnnnnnnnnnnnnnnnnnnnnnnnnnnnnnnnnnnnnnnnnnnnnnnnnnnnnnnnnnnnnnnnnnnnnnnnnnnnnnnnnnnnnnnnnnncaagtctttgcaaacatgtgtatctcacatctctgctgttttggttttctacatccccatcattggtctgactatggttcaccgctttgggaagcatctctctcctctggttcaggtcctcatgggcaacatttatatccttttcccaccctttatgaaccccattatatacagtatcaaaactcagcagattcgagtgagaattgggagactgtttactttgaaaggaacc

SEQ ID NO: 880 - DNA, 955 bp, Mus musculus
  variation (340)...(745): Any nucleotide A, C, G or T
  MOR40-8P
atggcattatccaacgattctgaagctcccatctctgaattcctcctcatctgcttccccaactaccagacctggcagcattggctgtccctgcccctcagcctcctcttcctcctggccatgggggccaatgccacccttctcatcaccatcaggttggaggcctctctgcatgagcccatgtactacctgctcagccttctgtccctgctggacattgtgctctgcctcactgtcatacctaaggtcctggccatcttctggtttgacaataaatctattggcttctcttcctgcttcctccagatgtttgtcatgaacagtttcctgacgatggagtnnnnnnnnnnnnnnnnnnnnnnnnnnnnnnnnnnnnnnnnnnnnnnnnnnnnnnnnnnnnnnnnnnnnnnnnnnnnnnnnnnnnnnnnnnnnnnnnnnnnnnnnnnnnnnnnnnnnnnnnnnnnnnnnnnnnnnnnnnnnnnnnnnnnnnnnnnnnnnnnnnnnnnnnnnnnnnnnnnnnnnnnnnnnnnnnnnnnnnnnnnnnnnnnnnnnnnnnnnnnnnnnnnnnnnnnnnnnnnnnnnnnnnnnnnnnnnnnnnnnnnnnnnnnnnnnnnnnnnnnnnnnnnnnnnnnnnnnnnnnnnnnnnnnnnnnnnnnnnnnnnnnnnnnnnnnnnnnnnnnnnnnnnnnnnnnnnnnnnnnnnnnnnnnnnnnnnnnnnnnnnnnnnnnnnnnnnnnnnnnnnnnnatgtggttcccacttcatcctcatcctcttcttcagcacagtcttgctggtgctagtcatcactaacctggccgggagaggattcccccggacatccccatcctgctcaatatcctgcatcacctcatccccccagctctgaatcccattgtttatggggtaagaaccagggagatcaagcagggaatccagaacttgttgaggaggttg

SEQ ID NO: 881 - DNA, 965 bp, Mus musculus
  MOR0-5P
atggagctggatcctgcggtgcctgcccttaagaagacactttctgagcctgggccctttgtcctattgggtgtggcagaacttgagggcctgcatgcctggttttctgtgcccatgagcttgctgtatctggtagggatgatagacaccttctcctgggggtggtggcagttgacacaacccttcaggctcccatgtaccagcttttgggggcttctggcagctgctgacttaattctggccacatctccagcacctaaagctcaagctgtgctctggggcttgtttggagaaatctcctttggaggctggttagctcagtgctttgttgttcatgtggccttcactgctgagtcctcagtgctgccagccatggcaatggatcactctgtgtccatcagacagcctctatgctatggggctttgctgagccagcatgtggtgggcatagtggctgcagcagctgtgactcatggtgcccgtgtcatggcaccccctgtggtccttctccagacactccctcactgtgggcatcgggcttcgcctcacacttactgtgagcatatgggtgtggcttgtctagcatgtgatgacacatgtcccaatatttggtttggactggctaccacactgccctccccagtcctggacctcgggctcatagatgtttcctatgccctcatgctgtcagtcgcctgctatgccacagcgcccattacaaggccttgggtaaacatgggactcatgctgctggtctcttttataaacctgctctcttttctttcctggcttactgttgtggcctccatacaattcccagccacatccacatcctactggcaaatctctacgtggtagttcctcctgccatggtagttcctccttttcttaaacccgtgctctatggagtgcgcatgcagcagatcactcagaggcttaggctcgtgcttcagagagtgagaaaa

SEQ ID NO: 882 - DNA, 968 bp, Mus musculus
  MOR268-4
atgacccagggctccactacagcaatgagggggcagaatgacagctctgtggctgagttcatcctcttgggattttcgaactatcctgaactccaaaggcaaatgtttggggctttcttagttatttacctggtgactctgactggaaatgccctcattatgtctgtcatcctcctggaccggagcctgcatatccccatgtacctgttcttgcagaacttgtctgtggtggagactggcttcagcacaactgttatgcctgagatgctggtggtcctgactagtgagaaagcgaccatttcctttgggggctgttttgcacagatgtatttcattcttctctttggtgggactgagtgttttctcttgggggcaatggcttatgatcgatttgctgcaatctgccatcctctatcctaccctgtgattatgaacaaaagagtttttatgacgttagtgacatgctcatggctctcaggaaccatgatgactactttgcagaccatatgggtgttcagtttcccctactgtggctccaatgaaattaaccacatctcatgtgaaaccccagcagtactggagcttgcatgtacagacatttttttctttgagatctatgccttcacaggcactgttctgatcattttgactcccttcgtgctgattcttttgtcttacatccgaatcctcttctccatcctgaagatgccatccactacagggaggcagaaggccttttccacgtgtgcctctcatctcacctcggtcaccctcttctatggcacggccagtatgacctatctgcagcctaaatccaagtactaccagacaccaagaaactgatgtcattggcttactctctgctcactcctctgctgaatccacttatctacagcctgagaaacaaggagatgaaaagggctgtggtaaaattatgggaaagaaaagtggctttacacacaacctga

SEQ ID NO: 883 - DNA, 870 bp, Mus musculus
  MOR23-2
cagttttggattggatttccattctttacagtgtgtctggtggctcttttgggaaatatcattttattaatcatcatcccagccgagcgtagcttacaccaacccatgtacatcttcctggctgtgctggcagctacagacataggactttgtgcagccattgcccccaaaatgttggccatattttggttcagggcttattccatggcctttgatgcctgcctagcccaactcttcttcatccataccttacagtgcatggagtccggcattctattggcaatggcttttgatcgatacattgcaatctgtgatcctctgaggcacacatctattcttacaccttcaattcttggtcggatgatagtggtggtggtaattggagcggtagtacttgtaggcctgttacctattctaataaaaagactgcaccatttttggtccattcaaattgcccactcttactgtgaacacatggctgtggtgaagcttgcagcagatgatgtacaggtcaataagatatgtggtctttttgtggggtttagcattctgggatttgacatggtttttatcatcatatcatatgccctgattttccaagctgtttttcgccttaaacagaaggaggcaaggctcaaagcctttaacacctgcacagctcatatttttgtttttttagagttctatattcttgcctttttctccttttttagccaccgttttggtcatgttgttccctccactcacattcttctgtcaaccatctacctcctcttgcctcctgctctcaaccctattgtgtatggagtaaaaaacatggtcattcgaaagcgggttgcacagatcttttttctagatcatgcacatcag

SEQ ID NO: 884 - DNA, 691 bp, Mus musculus
  MOR105-7P
atggataagaagaatcagacgaaggtgacagagatttatttttctgatttccctcagtttgaggatggtggccttttgctcttcatccttctgctctgtgtctacctgttcattgttgttgggaacgctgtgatcttcttggctgtgcagctggatgtccgtctgcacaatcccatgtacagtttcatcagcatcttctccttcctggagatttgctacaccacagtgaccattccccaaatgctctacaacttggtcagcaaagagaaaaccatctccttcattggatgtctactgcagatgtattttttccattcctttggagtcacagaaagcttagtcctcacaataatggccatcgacaggtatgttgccatctgtaacccacttcgctatgcaatcattataactccaaagctctgcacacagctttccacaggctctttcaccctcggcttcctcatgctcctcccagagattgtttggatatctactctgcccttctgtggccccaatcagattcaccagctcttctgtgacttagaacctatgctcctcttggcatgtacagacacatctatgattctggttgaagatgtcatccatgctatctccatcctgagctgtgtctctatcatcagcctttcctatttaagaatcattacccgtagtcctgaagattccatctggt

SEQ ID NO: 885 - DNA, 952 bp, Mus musculus
  MOR105-8
atggataagaagaatcagacgaaggtgacagagttttatttttctgatttccctcagtttgaggatggtggccttttgctcttcatccttctgctctgtgtctacctgttcattgttgttgggaatgctatgatcttcttggctgtgcagctggatgtccgtctgcacaatcccatgtacagtttcatcagcatcttctccttcctggagatttgctacaccacagtgaccattccccaaatgctctacaacctggtcagcaaagagaaaaccatctccttcattggctgtctactgcagatgtattttttccattcctttggaatcactgaaggcttagtcctcacaataatggccattgacaggtatgttgccatctgtaacccacttcgctatgcaatcattataactccaaagctctgcacacagctttccacagggctctgtcaccctcggcttcctcatgctcctcccagagattgtttggatatctactctgcccttctgtggccccaatcagattcaccagctcttctgtgacttagaacctgtgctcctcttggcatgtacagacacatctatgattctggttgaagatatcatccatgctatctccatcctgagctgtgtctctatcatcagcctttcctatttaagaatcattaccgtggtcttgaagattccatctggtgagagccgtcagaaggcattctccacatgcacagcccacatcaccatttttgtgctgttttttggcagtgtgtctctcatgtacctgcgcttctctgtcaccttccaaccactactggagaaggtcattgcactaatgtttgctgtccttgccccatttttcaatcctataatctacagcctgaggaacaaggatatgaaaaaagccattaaggaaatgttctgttctcaaaaagttcgccgtctctgggaaccgatgtga

SEQ ID NO: 886 - DNA, 943 bp, Mus musculus
  variation (489)...(664): Any nucleotide A, C, G or T
  MOR103-13P
atggttatcaagggtctgcaagtagacaattggactgagacaacacattttgttcttcttggatttccatcacgaccagccttccagtttctgctcttctctgtcttcctggtaacctatctgctgacactggcagagaaccttctcatcatcctggccatacgcagtgatgggcaactgcacaagcccatgtacttctttctaagccacctctctttcctagagatgtggtatgtcactgtcatcagtcccaaaatgctagtagacttcctcagcaaggacaagagcatctcattcaatggctgcatgacacaactttacttctttgtgacctttgtctgcactgagtacatactccttgctgtcatggccctttgatcgctatgtagccatttgcaatccactacgctaccctgttattatgaccaaccagctctgtggagtaatggctgggggatgctgggttctgtgggctcatgactgccatgnnnnnnnnnnnnnnnnnnnnnnnnnnnnnnnnnnnnnnnnnnnnnnnnnnnnnnnnnnnnnnnnnnnnnnnnnnnnnnnnnnnnnnnnnnnnnnnnnnnnnnnnnnnnnnnnnnnnnnnnnnnnnnnnnnnnnnnnnnnnnnnnnnnnnnnnnnnnnnnnnnnnnnnnnnnnnnnnatcccgtcagctcagggtcgtcaaaaggccttctccacctgtgcctctcatctgacagttgtaactcttttttactccacaacactttttacttatgcccgtcctaagctcatgtatgcctacaattcaaacaaagtggtgtcagttctctacactgttgttgttccccttctcaaccccatcatatactgtttgagaaatcgtgatgtaaaaatggccctaaaaaagactatactttgcaatagaagtggttctgggggagatggggatttcagtagt

SEQ ID NO: 887 - DNA, 951 bp, Mus musculus
  MOR259-5
atgttaggacaaaaccaaagttgggtctctgagttcatcctgattggcttctccagtgatcccacaaccaacagcatcctcttcattgtcttccttctcatctacctgagctcagtcctgggcaacgggctcatcatcatgctggtctgcctggacacacagctgcacactcccatgtacttcttcctctgtaccctctccctgttggatatgggctatgtcaccaccaccatgccccagatgttggtacatcttcttgctcactctcagacaatctcctttgctggctgctggctgcagatgtttgtgtttggtgccctgagtataactgagtgcatgatttttgttgcgatgtcttatgaccggtatgtggccatttgctatccactgcgctatactgtcattctcaactgagacctgtgcatacgtttggcagcagggtcttggatctgtggtttcttttcctctttattgaatactttcttcaccatgagcctgccatattgtgggcccaacaatgtcaaccactacttgtgtgaaggtccttcagtgcgtagcttggcttgcatggatactcactttgtagagatggtggacttggtcttgagtgtttttgtggttgttactccaatttccctcattgtggcttcctacattcgtattgccaaggcaattctcaagattaagtccacccaggggcgctgcaaggctttctctacctgtgcctcccacctgactgtggttacactcttctatcttcctgctacttacatctacatgagacccaactccagcagctcttctgaaagagacaagcagatctcactcttttatactgcttttacaccattgctcaaccctgtggtctacagtctgagaaacaaggacatcaagagggcgtttctcaaggtgatgctttatggcagatggatccgtggaccacaatggtga

SEQ ID NO: 888 - DNA, 543 bp, Mus musculus
  MOR259-6
cactggggcctctgcatacggttggcagcagggtcttggatttgtggtttcttttcctctttattgcacactttcttcaccatgagtctgccatattgtgggcccaacagggtcaaccactacttgtgtgaaggtccttcagtgcgtagcttggcttgcatggatacccacatcattgagatggtggacttggtcttgagtgtctttttggttgttactccaatctccctcattgtggcttcctacattcgtattgccatggcaattctcaagatcaagtccacagagggccgctgcaaggctttctctacatgtgcctcccacctgactgtggtcacattcttctatgctccagccagttacatttacatgaggccgaactccagctactcccctgagcaagacaagcagatctcactcttttacagtgcttttacaccattgctcaaccctgtggtctatagtctgaggaacaaagacatcaagagggcattttttaaggtgatgggttatgacaggtgtgccagtggaccaggatggtga

SEQ ID NO: 889 - DNA, 971 bp, Mus musculus
  MOR133-2
atggcaagaggaaaccagaccagcatctttgagttcctcctctggggactgtcagagcagccacagcagcaacacatcctcttcctggtctttctgtggatgtacctggtcacagtagctgggaatctactcattgtcctggccattagcactgatgtacgactccacacacccatgtacttcttccttgccagcctgtcctgtgatgacatactcctcgtctccaccatagtgcccaaggccctagtgaacatccacacccaaagcaggaccatctcctatgcaggatgcctggtccagctctattttttcttgacttttggagacatggacatctttctcctggccacaatggcctatgaccgctttgtggctatttccaccctctccactacaggatgatcatgagcttccagcgctgctcactcttagtgacagtctgttggatccttacaaccgttgtggccatgacacacaccttcctcatattctggttctccttctactctaagaaggtcattccaggcttcttctgtgacctggaacccctaataaagatcccttgctctgaaacccggatcaatgagcttgtgcttctcttcctggggagtgcagttgtcttcatcctccttttgctcatccttgtatcttatatccaaattgtgtcagccatcttcagggtcccttctgcccaaggaaggcataaggccttttctacctgtgggtcccacctttctgtggtggccctattctttgggactgtgataagggcttatctatgtccctcatcctcttcctctaactcagtggtagaggacacagcagctgctgtcatgtatacagtggtgactcccctgctgaaccccttcatttacagcctacgaaacaaagacatgaagggagcactggtcagaattctcaagggcaaagtccccttttcctgggcccagggacttcttcagaaaaagtga

SEQ ID NO: 890 - DNA, 1053 bp, Mus musculus
  variation (397)...(664): Any nucleotide A, C, G or T
  MOR133-3P
atggcaagaggaaaccagaccagcacctttgagttcctcctctggggactgtcagagaagccacagcagcaacacatcctcttcctggtcttcctgtggatgtacctggtcacagtagctgggaatctgctcattgtcctggccattagcactgatgtacgactccacacacccatgtacttcttccttgccaccctttcctgtgttgacatcctcttcacctccaccacagtgcccaaggccctagtgaacatccacacccaaagcaggacaatctcctatgcaggatgcctggtccagctctattttttcctgacttttggagacatggacatctttctcctggccacaatggcctatgaccgctttgtagctatttgtcaccctctccactatnnnnnnnnnnnnnnnnnnnnnnnnnnnnnnnnnnnnnnnnnnnnnnnnnnnnnnnnnnnnnnnnnnnnnnnnnnnnnnnnnnnnnnnnnnnnnnnnnnnnnnnnnnnnnnnnnnnnnnnnnnnnnnnnnnnnnnnnnnnnnnnnnnnnnnnnnnnnnnnnnnnnnnnnnnnnnnnnnnnnnnnnnnnnnnnnnnnnnnnnnnnnnnnnnnnnnnnnnnnnnnnnnnnnnnnnnnnnnnnnnnnnnnnnnnnnnnnnnnnnnnnnnnnntgagcttgtgcttctcttcctggggggtgcagtcatcttaatccccctttttgctcatccttatgtcttatatccgcattgtttcagccatcctcagggtcccttctgcccaaggaaggcgtaaggccttttctacctgtgggtcccacctttctgtggtggccctattctttgggactgtgataagggcttatctatgtccttcatcctcttcctctaactcagtggtagaggacacagcagcagctgtcatgtatacagtggtgactcccctgctgaaccccttcatttacagcctgcgaaacaaagacatgaagggagcactggtcagaattctcaagggcaaagtctccttctcctgggctcagggacttctgcagagaaagtga

SEQ ID NO: 891 - DNA, 938 bp, Mus musculus
  MOR125-2P
atgaaagaagaaaacgagtcttttaccacagatttcactctcctaggcgttacaaggcatcgggagcaggaatatttcttcttcatcctcttcctgttcctttaccccatcacagtgattgagaatgtgctcatcatcctagccattcactctgacactcgcctgcataacgtcatgtactttttcctggccaacctctcccttgttgacatcttcttctcctttgtaactatccccaagatgctggccaaccatctcctgggtagaaaggccatctcctttgggggatgtatgtcacagatgtacttcatgatatcattgggaaacacagacagttatatactagctccaaaggcatatgaccgagctgtggctatcagttgcccacttcattatgcaacaattatgagttcacgaccttgagtcctgctggttgctgggtcctgggtgattgaaaatgccaatgtgctgccccacaccctactcacagttatattgccctctgtggcaataaggatgtggctaacttctactttgacattatgcctttgctctaggtgtcatgctctgatatctgcttcaatgtgaaaatgatgtaccttggggtgggggtcttctctgtgccactgctataaagcttcatctcctatgtcccggtcttttccatagtcttgcgggttccatgcaccacgggtttcctcaaggccttgtctacctgtggctctcacctgacagtggtgtccttgtattatgggacagtcatgggcatgtatttccggcccctgaccagttacagtctgaagcatgcattgataactgtgatgtacacggcagtgaccccaatgctgaaccctttcatctacagcctgaggaaccgggacatgaaggctgctctgaggaaactcttccactgcccctcttcctcttcttccctcatg

SEQ ID NO: 892 - DNA, 933 bp, Mus musculus
  MOR125-3P
atgagagaagaaaatgagtcttctaccacagatttcactctcctgggagttacaaggcagcgggagcaggaatatttcttcttcatcctcttcctgttcctttaccccatcacagtgattgagaacatgctcatcatcctagccattcactctgacactcacctgcataacaccatgtactttttcctggccaaccgctcccttgttgacatcttctctgtaactatccccaagatgctggccaaccatctcctgggtagaaaggccatctcctttgggggatgtatgtcacagatgtacttcatgttatcactgggaaacacagagagttgtatactagcttcagtggcatatgactgagctgtggctatcagttgcccgcttcattatccaacaattatgagtccacgaccttgtgtcttgctggttgctgggtcctgggtgattgcaaatgccaatgtgctgccccacaccctactcacagctagattgtccttctttggcaataaggatgtggccaacttctactgtgacattatacctttgctccagatgtcctgctctggatatctgcttcaatgtgaagatgatgtaccttggggtaaggatcttccctgtgccactgttgtgcatcatcatctcttatgtccgggtcttttccacagtattgcgggttccatctaccaagggcctcctcaaggacttgtccacttgtggctctcacctgacagtgatgtttttgtattatggaacagtcatggtcatgtatttcaagcacctgaccagttacagtctgaagcacacactaataattgtgatgtacatgacagtgattaaatgctgaaccctttcatttacagcctgaggaaccgggacatgaaggctgctctgaagaaactcttccactgcccctcttcctcttcctccatcatg

SEQ ID NO: 893 - DNA, 1060 bp, Mus musculus
  MOR125-4P
atgaaagaagaaaacgagtcttttaccacagatttcaccctcctaggagttacaaggcagcgggagcaggaatacttcttcttcatcctcttcctgttcttttaccccatcacagtgattgagaatgtgctcatcatcctagcatcttcttctcctctgcaactatcctcaagatgctggccaaccatctcctgggtagcaaaggccatctatctcctttggggaatgtagggcacagatgaccttcatgacaagcttggcaaatacagatagttgtatactagctgcaatggtgtatgaccgatctgtggccatcagctgctcacttcattatgcaacaattatgagtctatgactttgtgccctgctggatgctgggtcctgggtgatttaaaaggccaatatgctgccccacacccaactcacagctagattgtccttttgtggcaataaggatgtggccatcttcttttttttttttttttttttttttgatacagggttttctgtgtagccctggctgtcctggaactcattctgtagaacaggctgaccttgaactcagaaatctgcctgcctctgcctcataagtgctgggattaaaggcgtgtgccaccattgcctggcctgtggctaacttctactgtgacaacatgcctttgctccagctgtcctgctctgatatctgcttcaatgtgaagatgatgtaccttggggtggggagtcttctctgtgccactgctgtacatcatttcttatgtccgggtcttttccacagtcttgcgggttccatccaccaagggtttcctcaaggccttgtctacctgtggccctcacctgacagtggtgtccttgtattatgggacagtcatggtcatgtatttcaggcccctgaccagttacagtctgaagcacacactgataattgtgatgtacacagcagtgaccccaatgctgaacactcatctacagcctgaggaaccgggacatgaagactgctctcaagaaactcttacaccaaatgcagacactattgcatatgccagcaagattttgctga

SEQ ID NO: 894 - DNA, 922 bp, Mus musculus
  MOR202-23
atggagaacaagacagaagtgacacagttcttcctgcagggacttgccagtgacccaggcctacagcttcctctctttatcatctttctcctcatctacaccatcactctggtgggcaacctgggaatgatcctgctgattgtccttgatgctcaccttcacagtcccatgtatatttttcttggtaatctatcactggtggacttttgttactcttcaggtgtcactccaaaagtcatggctggttttctagtaggagataaagtcatgtcgtataatgactgtgctgctcagatgttttttgttacaggctttgctactgtggaaaattacctgttggcctcaatggcttatgatcgctatgcagcagtgtgtaagcccctacactatgctagcaccatgactacaagtatgtgtatatggatgatcgcaggttgctatgcctgtggctttctgaatgcctgtatctataccggggatgcatttagtttatctttctgtaaggctgatgtggtccatcattttttctgtgatattccagcagtcatggtactctcttgctccaataaacatataaatgagctggttcttgtttgtgtagccagtttcaatatttttttttgctctcataatcatcttaatatcctacctaatgatttttatcacaattataaagatgcactcagcttcaggacatcaaaaggccatgtccacctgtgcttctcatttcactgctgtttttattttctatgggacagtaattttcatgtacttgcagcctagttccagtcatgctatggacactgacaaaactgtgtctgtgttctataccatggtgatccccctgctgaaccctctggtgtacagcttgaggaacaaggaagtcaagagtgcattcagaaaaattattttcaggccaaaa

SEQ ID NO: 895 - DNA, 922 bp, Mus musculus
  MOR202-24
atggagaacgggacagaaatggtacgcttcatcctgatgggactcaccgatgatccagacctgcagcttcccctcttcatcacatttcttctcatctacatcatcacccttgtagggaacctggggctgatcctgttgattctcctggactctcagctccacaccccccatgtacattttcctaagtaacctgtccctagtggacttctgttactcttcaacagtcactccaaaagtcatggctggattcattataggagacaagatgatgtcctacaatgcttgtgcctctcagatgttcttttttgcaaactttgccaacgtggaaaactatcttttggcttcaatggcctatgaccgctatgcagcagtatgtaaacccctacattatgccaccaccatgacaacacgtgtgtgcgcatgtctagtcattagctgttatatctgtggtttcctgaatgcttccatctatactgtgaatgcattataccttaccttctgtgagttaaacgtggtccatcattttttctgtgacattccagcagtcatgattgcatcttgttctcatagacatgctaatgacatggttcttatttctgtagccagcttcaatatcttctttgcgcttatacttatcttaatatcatacacattcattttcaccaacatactaaagatgcattccaattcaggatatcgcaaagctctctccacatgtgcctcacatttcacagctgtctctattttctatgggacaatcatattcatgtacttgcagcccaggtccagtcattccatggacactgacaaaatcgcatctgtgttctacaccatggtcatccctatgttgaaccctctggtttacagtctgaggaacaaggatgtgaaaagtgcattcacaaagattgtattgaggtcaaga

SEQ ID NO: 896 - DNA, 955 bp, Mus musculus
  MOR202-25P
attaatttggtggagaatatttcagaggttactgaatttattctcgtggggataacagatgccccagagcttctgatccctttatttattatcttcactctcatttatttgatcgcactgtttggaaatcttgggatgatcatgttgattctgctagactcccgactccactctcccatgtactttttcctctgtaacctccccctggtggactgtgtttatgcctcagcaatcacccccaaggtgatggaagggtttctcacaggaaataagataatatcctacaatgcatgtggtgcccagatgttcttctttgtagcctttggtgctattgaaagtttgatccttgcctcaatggcctatgactgtcaagcaggtgcgtgaaaactcctccactatactaccattatgacaagtagtacctgtattctcattgtcacttgctgctacatgtgtgggatcttacaatcttctgttcatgttgctcttgcattttgtctattcttctgtcactccaacatgattaatcacttttcctgtgacattcccccactgctggaaatttctcgttctgacacccacacaaatgggattacaccccttatcttggctacattagatcttgttttcactctcttggttatcttaaacacttacctgcttattttcattgctatcctgaggatgcattcagctgaagcacagaggaaggacttttctacccgtgtatctcatctcatcactgcgtccatcttctttggttcccttatattcatgtacttacaacctagttctagtcactccccagaggcagacaaaattgcatctgtgttttataccatggttatccctatctatgttcaaccctgtggcctacagcctgaggaatatagaggacaagtgtgcatttaagaaggttgttggtaagctaagaacttcacttcattctgtcaat

SEQ ID NO: 897 - DNA, 932 bp, Mus musculus
  variation (705)...(784): Any nucleotide A, C, G or T
  MOR202-26P
atggagaatatttcagaggttactgaatttattcttgtaggcttgacagatgccccagagcttcagattcctttgtttattatcttcactctcatttatttgattgcactgtttgggaatcttgggatgatcatactgattctgctggactcccgactccacactcccatgtactttttcctctgtaatctctcggtggtggactgtgtttatgcctcagcaatcacccccaaggtgatagaagggtttctcacaggaagtaagaccatatcattaaatgggtgtgctgcccagatgttcttctttgtagcctttattgctattgaaagtttgatccttgcctcaatggcctatgaccgtcatgcagcagtgtgcaaacccctgcactatactaccattatgacaagtaccacctgcattctaattgtcacctgctgctacatgtgtgggatcttacaatcttctgtccatgttgctctggcattttgtctttccttctgtcattccaacgtgattaatcactttttctgtgacattcccccactgctggacatttcttgttctgacacccacacaaatgagattacactgcttgtcttggctacattggatgttgttttcactctcttggttatcttaaacacttacctgcttattttcattgctatccctgaggatgcgttcagctgaagcacagaggaaggnnnnnnnnnnnnnnnnnnnnnnnnnnnnnnnnnnnnnnnnnnnnnnnnnnnnnnnnnnnnnnnnnnnnnnnnnnnnnnnncatggacacagacaaaattgcatctgtgttttatacaatggtcattcctatgctgaaccctgtggtctacagcctgaggaacaaagaggtaaaaaatgcatttaagaaagttgttgaaagattaatgtcttcatttcatttagtccat

SEQ ID NO: 898 - DNA, 892 bp, Mus musculus
  variation (605)...(643): Any nucleotide A, C, G or T
  MOR202-27P
atggggaacaatacagatgtgacacactttctcctgcttggactcacagatgacccagaactacagcttcccctcttcatgatatttctaattatctacaccatcaccctggtaggaaatctggggataatcctgctgattttcctggactcttctctccacagtcccatgtacttttttctaggtaatctgtccctggtggatttttgttactcctcagatgtcacaccaagagtcatgactgggctcctaataggagacaaggtcatttcctataatgggtgtgctgctcagatgttcttttttgtagcctttgctacagtggaaaattttctgttggcctcaatggcctatgatcgttatgcagcagtatgtaagcctctacactatgccaccactatgacttcaggtgtgtgtgtgtgtctttctataggtgcctatacttgtggtttcctgattgcctccatccacattggggacacattcagtctttctttctgtgggtctaatgtggtccatcacttcttttgtgatatcccagcagtcatgattctctcttgctctgatagacatgttagtgagctggttcttttttatgtagggannnnnnnnnnnnnnnnnnnnnnnnnnnnnnnnnnnnnnnttgtagagttaataagtctaatcattgtattctgccacttgccaattaaattccagaatggattttcatatttctgcatgtcaatagcatagaagtatagaaaaaggattatactgaattcaggagattatgagaatttttttgtcttttaaaaatacttctgtaaaaattatgtgtatattgttttagtggatgatttgttaaatgtcttcatacagtcaagataatgtagaaaaggattttaaaaac

SEQ ID NO: 899 - DNA, 923 bp, Mus musculus
  MOR202-28
atggagaacaatacagaagtgacacactttctcctgcttggactcacagatgacccagaactacagcttcccctcttcatgatacttctaatcatctacaccatcaccctggtaggaaatctggggaaaattctgctgattttcctggactcgtgtctccacactcccatgtacttttttctaggtaatctgtccctggtggatttttgttactcctctgatgtcacacccaaagtcatgagtgggctcctaaaaggagacaaggtcatatcctataatgggtgtgctgctcagatgttcttttttgtagcctttgctacagtggaaaattttctgttggcctcaatggcatatgatcgctatgcagcagtgtgtaagcccttgcactatgccaccactatgacttcaggtgtgtgtgtgtgtctttctataggttcctatgcctgtggtttcctgattgcctccattcacattggggacaccttcaatctttctttctgtaggtctaatgtggtccatcacttcttttgtgatatcccagcagtcatgattctctcttgctctgatagacatgttagtgagctggttcttttttatgtagggagcttcagtattttttttttgctgtgttagttatttgtatatcctacatattcatttttatcacaatctttaaaatgcattcaaatgctggatatggaaaggctgtatccacttgtgccgcacacttcactgcagtgtctattttctatgggactggcatattcatgtatttgcagcccagctccagtcactccatggacactgacaaaatcacatctgtgttctacaccatgatcatccctatgctgaatcctctggtctacagcatgaggaacaaagaagtcaagcgtgcattcacaaacgttttccacaaagcaaaa

SEQ ID NO: 900 - DNA, 868 bp, Mus musculus
  variation (451)...(470): Any nucleotide A, C, G or T
  MOR202-29P
atgacaccattgaaaaactggacagaagtgacacactttctcctgctgggacttactgatgatccaggactgcagcttcccctcttcatcatttttctcctcatctacattttcaccctggtagggaacctggggttgattctgctgattcttttggactctcggctccacactcccatgtacttttttcttggtaacttgtctctagttgatgttttttactcttcagctatcacaccaaaagtcatggctgggcttctattgggagacaagatcatatcctacaatagctgtgctgctcagatgtttgtttttgcaacctttgctactgtggaaaattacctgttggcctcaatggcctatgatcgctatgcagcagtatgtaaacccttacactatgctactaccatgactccaagtgtatgtatgtgtctgatcatgggctgctatnnnnnnnnnnnnnnnnnnnnttttttgtgacatgccagcactcatggctctctcttgctcggataggcatatcaatgagctagtacttatttatctagccagcttcactctcttctttgctctcataataatattagtatcatatactataatttttatcacaatcttaaacatgcacacaggagcaggacttcagaaggctatttctacctgtgcttcccactttattgctgtttttattttctatggaacaacaatcttcatgtatttgcagccaagctctagacattcaatggacactgacaaaattgtgtctgtgttctataccatggtcattcccatgctgaaccctttagtttacagcctgagaaacaaagaagtcaagagtgcattcatgaaatggattctgaaagaaaaa

SEQ ID NO: 901 - DNA, 941 bp, Mus musculus
  MOR202-30P
atgaagaagaacatagaagagagtgaattcatcctcctaggactaaccaaatcaccagagcttcaagttcttcttcttatgatactcacatttatctacgccatcactttgactggaaatcttggaatgttccttctgatattgctggatgctcatctacatacccccatgtacttcttccttagaaatctgtccttggtggacttgggtcttcctcaacagtcactccaaaggtcatggctggactccttacaggaagtaatgtaatttcttacaatacatatgctgttctgatgttcttctttgtattctttgccactgtggatagctacctcttagcctcatctcaatggcatatgatggatatgcagcagtgtgtaaacccttacattatactaccactatgacaaaaggtgtctgtacttgtctggccattagttcctatatttttggcattttgaatgcttctatacaaatatatatttggcctccctttctgtggatataatgtgattaatcaccttttctgtgatattcctgcagtgagaattctggcttgctctgataaacatgtgaatgagatgattcttattcttgtatctagctttcacattatatttgtttttcttgttatcttgatttcctacttactcatatttttgtacattttgaagatgcattcaagtgagggataccataaggctttttccacctgtgcttcccacgtcactgcagtttttacattttacggaactgtcaccatagtgtacttaaagccaagtgccaatcattccatagacacagataaatttgtctctgtgatttatactatggtcattcccatgctgaatcctatggtctatagcctgacgaacaaagaagttaagaatgcattaaagaacatttttcaaaaggcaaagctatatgtatatatgctatat

SEQ ID NO: 902 - DNA, 1126 bp, Mus musculus
  MOR202-31P
atgacaatgatggagaacagaacagaagtgacacagttcatcctttcaagactcactgatgacccaagtctgcagcttcccctcttcatcaccttcctcctcatctacatcctcatcctggggatgatcctactttttattctggattcttggctctacatccccatgtactttttcctgggtaatccttcccttggtgatctcagttactcttcatatatcactcccaaagtcatggatgagctctttaataggagacaacgtctcctatgtcttacaatgactgtgctgatcagatgttctttgctgcaggctttgcttctgtggaaaattatctgtaagcctcagctggctatgattgctatgcaaaactgtgtaagctattacaccatgccaccttaattactaaaggagtgtttgtatatataatcataaactgttacatatttgacttcatgaaagatttttttgttgttgtttttttgagacagggtttctctgtatagccctagctgtcctggaactcactctgtagaccaggatggcctcaaactctgaaatccacctgcctctgcctcccaagtactgggattaaaggtgtgtgccatcactgcctctccatgaatgaatttttattcattggagatacttgtatcagttcagtttctacttctgtaaatttaatgtgatttaccatttattcttttatatgccagccatcatgtatgtctcttgatctgatagacatgtgaatgagctggtttctgtttgtctagccagcttcaatatctttttttgctctcataattatctattatctcatattattattttcattggtatcctaagaatgcactcaggtacaggccatcagaagtctatatccacctgtgcttcccatataattcctgtcactgcattctatgggactcttatcttcatgtacttacaatccagttccagtcatgcaatgaacactgacaaaactgtatctgtgttttatactatggtcatccctatgtttaatcctgtggtctatagtttgaggaacaagtagatcaaagtagcattcagaaaaattgttctgatggaaaaaaagctttttgtttataactttaacatttag

SEQ ID NO: 903 - DNA, 937 bp, Mus musculus
  MOR214-6
atgattaaggaaagaaactttactgagatcaccgaattcatcctcctaggattctctgatttcccccaaatcacagcactgctttttgttatgttcctcatcctgtatattacaaccctgacctggaacctgtcccttgttgttttaataaggatggactcctatctccatacacctatgtacttcttccttagtaatctgtcctttatagacatctgctatatctcttctacagtcccaaagatgctttccaacctcttccaggaaaagcaaactatcagctttgtgggctgcatagttcaatactttatgtttgccacaatgggattgagtgaatcttgcctcatgacagccatggcctatgacaggtatgctgccatttgtaaccctcttctgtactcatcagtcatgtcacccacactttgcgctcagatggtgatgggaagctacacagcaggaatcatgggttctctatctcaggtgtgtgccttgctgcagctccacttctgtggacctaacgtcatcagacatttcttctgtgacatgccccagctgttaaatctatcctgcactgacactttttttgcacaggtagtgcttctcatattaacaatgttgttttgtatttcaaatgctttagtcatcataatatcctatggctatattgtcttgtccattctgaagatcacttcagctaagggtaggtccaaggcattcaatacttgtgcttctcacctgacagctgtttccctattctacacctccagtgcttttgtatatttgagttccagcttctggtggctcctccagctttgatagatttgtgtctgtcttctacactgtgttgattcctatgttgaaccctttggtttatagtctgaggaacaaggaaatcaaagatgctggaaagaggttacagaagaagctgggatgctgc

SEQ ID NO: 904 - DNA, 961 bp, Mus musculus
  MOR215-4
atggccggaggaagaaacagcacagttgtgaccagattcatcctcctgggattctcagatcagcctcagatgaaaatcttcctttttatgctgtttctggggatttatatcctgaccttagcctggaacttgagcctcatcaccctcattaggatggacagtcacctccacacacccatgtacttctttctcagtaatctctccttcctggacatctgttattcatcctccactgcccccaagatgctttctgacattgtcacagataagaacaccatttcttttcttggctgtgccacacaatactttgtcttctgtggaatggggctgactgaatgcttgctcctggcagctatggcctatgacaggtacactgctgtctgcaacccactgctctacatggctctcatgtcccatactctctgtttaaagttggtggctggtgcctatatgggtggtttccttagttctttgattgcaacatgctctatctaccagcatgatttctgtgggcccaacataatcaaccacttcttctgtgaccttcctccagtcctggctctagcctgctctgacatctttaccagccaggtggtgacctttattttaggtgtcattgtggggggtgatgtctgtcctagtggtcctcatctcttatggatacattattgctgctgtccttaggatcaactcagctaaaggtaggaccaaggcctttagcaccagtgcttctcacctgactgctgtgaccctcttctatggctctggtctcttcatgtacatgagacccaattcaagttattccctcggacaggacaaggtggcatctgtattctatgctgtggtggtccccatgatgaaccccatcatttatagcctcagaaataaggacattaaaaatgctgtgaggaaagctgtggaaagggacagcatgctttctcatgggtattcatttttctga

SEQ ID NO: 905 - DNA, 892 bp, Mus musculus
  variation (478)...(498): Any nucleotide A, C, G or T
  MOR241-4P
gtaatcatttattaaccggtgttcacagaattggtttgtccctctccccttgatgaaaaactcagcagggaagccatcctgtttgcatatatgatgctctctacacccccattgtatgttataagcaaaatctccctgagccccactgctttcattccatcctcactttctcatgcctcctgctccttttgatgctggaaaagcccgagcacagaactgctgtagagagaattttggtttctttaaaaatactgataagttatctgaatatatttttgtctcaatcccagatgtgggctattggggtgcatcaggttgtccacatcaactaactactttgtctagtgctctggcaggggtgtcattttgccagctgaagatagtttatgtttggaattctggggactcctgagagaatttgaaaataccaacgcctgagaggggttggcagctgtggttcccctgcaggtgctgttggnnnnnnnnnnnnnnnnnnnncccttgtcttgctctgatcccttcatcagccagctggttcttttcctggcagctctttttgttgggtttggctctttcccttgttattatcttctcctatgtattcattgcagtttccatcctgaaagtggcctcattcaaaggccgtgtcaaagcattcaagacatgtggctcccacctggcagcagtgactctcttctatggcacagtcttctctgtgtacatgcaccacagctctcagcactccacaaagcaagacaaggtgctgtctgtggtctacaccatcctcatccccatggtaaaccctctgatctacagtctgaggaacacagagattaaggaggccctcaagagagtgctgaagaaggcagcgcatttacctcagaaagcatag

SEQ ID NO: 906 - DNA, 906 bp, Mus musculus
  MOR106-7
ttctcttggggatttcctggttcctgggaagaacagattttcctcttcgtgttgtttttggtgttttatgtcttgacattgttgggaaatggagccatcatctgtgcagtaagatgtgactcacgtctacatacccccatgtacttcctcctgggaaattttgccttccttgaaatctggtatgtttcctccactactcctaacacactagccaacattctgtctaagactaagaccatctccttttcagggtgcttcctgcagttctatttcttcttttcactaggtacaactgaatgtttccttctgacagtaatggcttatgataggtacctggccatttgccgcccattacattaccctaccatcatgactaggaggctttgttgcattctggtatcctcatgctggctcattggattccttggatacccaattcctgtgttctccatctcccaacttcccttctgtggttctaatatcattgatcacttcctctgtgacatggacccattgatggctttgtcctgtgtcccagctcctattaccaaattaatgctttatgtccaaaattcccttttcctgtttttcactattgcatacattcttcagtcctatattttgttgctcaaggctatttttcaggttccttctgcagctggccgacgaaaggccttctctacctgtggttcccatttagttgtggtgtcactcttctatgggacagtaatgataatgtacatgagtcctacatatggcatttcaactttgatgcagaagatccttacacttgtatactctgtaatgactcctctctttaatcctctgatttatagccttcgtaacaaggacatgaaacttgctctgaggaaagttctgttaggaatgagaattgtcaaaaatata

SEQ ID NO: 907 - DNA, 956 bp, Mus musculus
  variation (530)...(550): Any nucleotide A, C, G or T
  MOR106-8P
atgaaaaccctcaacagtcccagcaactccagcaccatcactggcttcatcctcttgggcttcccctgccccagggaggggcaaatccttctctttgtgaccttcttcgttgtctacctactaatcctcatgggcaacgcttccatcatctgtgctgtatactgtgatcagagactccacacccccatgtacctcctgctggccaacttctccttcctggagatctggtatgtcacttccacagtccccaacatgttggccaacttcctttcagacaccaaggtcatctctttctctggatgcttcctgcagttctatttcttcttctcctttggttctacagaatgctttttcctggcagtcatggcatttgatcgataccttgccatctgtaggccactacattatccttctctcatgactaggcacctctgcaacaccctttgtgatcagttgctgggtgcttggtttcctctggttccctgtacccatcatcatcatctcccagatgtccttctggtgggtccagannnnnnnnnnnnnnnnnnnnattatagatcacttcctgtgtgacccaggccctcttttggcccttgcctgttccagtagccccattgatggaggttttctggacaattataatgtctattctcctggttattcctttcctcttcatcatgggatcttacatattggtcctaagaactgtgttcagacttccttcaagagatggacaaaaaaaggccttctccacctgtgggtcacatgtgactgtggtttctcttttctatggctcagtgatgataatgtatatgagcccaacatctggacatgaagctggaatgcagaagattgtgactctgttttattctgtaggtactccattacttaatcctgtgatatacagtctgaggaacaaagatatgaaaaatgccctgcaaaagattttaagaaca

SEQ ID NO: 908 - DNA, 426 bp, Mus musculus
  MOR106-9P
atgaacgtgtcagagggatccacggtgacatattttgtcttattgggattccctggtccctggaagattcaaatcacacttttctcactgattctgctgctctacatgataactttgactgggaatatggccatcatttgtgcagtgaggtggaaccaacaactccacacccctatgtatatgttcctggccaacttctccttcctagaaatctggtacgtgacctgcacagttcccaacatgctggtcaactctctttccaaaactaagactatatctttcactggatgctttactcagttctacttcttcttctccctgggcacaactgaatgtttcttcctctgtgccatggcttatgatcggtacctaaccatctgctacccactacactatccttccatcatgactaggcaattctgcagt

SEQ ID NO: 909 - DNA, 914 bp, Mus musculus
  variation (242)...(268): Any nucleotide A, C, G or T
  MOR138-4P
atgaacagcagcagcacttcagacttcatcttgctgggtctctctaccaatccctggatgcagaaacccctttttggcatcttcatcataatgtacctggtcacagtgatggggaatgtgctcatcatcctggtcatccgctctgactccaggctccatacacccatgtacttcttcctcagcaacttgtcattcatggatatctgcttcacaacagtcattgtacccaagatgctagtgannnnnnnnnnnnnnnnnnnnnnnnnnngatgcctagttcagatgtacttctttcatagcattagcaaacacggaatagctacctgctggcctccatggccattgatcgactggtggccatctgcaaccctttacattatgatgtggtgatgaggtcacaacgctgcctcctcatgttgctgggttcttgcaccatctcccatctgcatgcactgttccgtgtccttctcatgtctcgcctctcattctgtgcttcccatgtcattaagcactttttctgtgatactcagcctgtgttgaagctgtcctgctctgacacatcctccagccagattgtggtaatgactgagacactggctgtcattgtcactcccttcctatgcatactcttctcctacatgaaaatcattgtcactgtgctcaggattccctctgcagctggaaaatggaaagccttctctacttgtggctcccacctcactgtagtggccctgttctatgggagtgtcatctatgtctactttaggcctctgtccatgtactcagtggtgaaggaccggatagccactgttatgtatacagtagtgacacctatgatgaatcctttcatctatagcctgaggaacaaagatatgaagagaggtttaaggaagttaaaggacaggcttcactca

SEQ ID NO: 910 - DNA, 892 bp, Mus musculus
  variation (766)...(854): Any nucleotide A, C, G or T
  MOR138-5P
atgctccgggaaaaccagagccacatgacagaattcctccttttaggactgaccagcaaccccaaacaacaggtatggctttttgccagcttccttgccatgtacctggtcaatgtgattggcaactcagtcatcattgcatccatccagagagatgcccgactacacactcctatgtacttctttctctccaacctgtccctggtggacatctgctttaccactgtcatcgtgccacagatgttagtgaacttgctgacacagagaaagacaatcctctttgcccagtgcctcactcaaatgtatttctttgtggcttttggtattacagacagtttccttttggctgcgatggccattgaccgctatgttgctatttgcaatccacttcattacaacacagtcatgagtcccaggcgctgtcgcttgctggtggtggcatcctgggcagtgtcccatcttcactccctcacccacacaattctcatgggtcgcctctctttctgtggacccaatgtcattcatcacttcttttgtgatgtccagccactgctgacactctcctgctctgacacctctatcaatgagctcttggccttcacagagggctctgttgtaatcatgagcccttttatctttattgggtggctcttatatctatatcactcggactgttctgagggtcccctcaggggaaggaagggacaaagttttctctacctgtgggtctcacctcacagttgtagcactggtctatgggaccatnnnnnnnnnnnnnnnnnnnnnnnnnnnnnnnnnnnnnnnnnnnnnnnnnnnnnnnnnnnnnnnnnnnnnnnnnnnnnnnnnnnnnnnnnacatgaaacaggccttgagaaaactggctaaaagaaca

SEQ ID NO: 911 - DNA, 495 bp, Mus musculus
  MOR264-9P
atgaaattcacagaaatcagggcagaggacaatgcttccactgtgacagagtttctcctcctgggattttcagaccttcctaacttacaagggattctgtttgggatgttctccataatttacttgatcatattggttggaaatagtttcataattgtgataactagaattgatcctgcactacagaagcccatgtattttttcctggcaaatttttcttctctggaaatctgttatgtatcagtcactcttcctaggattctgtttagcattgctgctcaagagagaaagatttctgtactcagctatgccacccagttgtgtttcttccttatgctgggagccactgaatgttttctgctggctgtgatgtcctatgaccgctatgtggccatctgtaaccctctgcactatcctttggtcatgaacccaacaaagtgcactcagctggcagcagcctcctggcttggaggcatcccagtccagataggacaa

SEQ ID NO: 912 - DNA, 433 bp, Mus musculus
  MOR264-10P
aaatttaccacatctacagatgaagacctattcaaacaagaaaaattgaatgcctccacactgatggaatttactcttcttgggttttctaatgttcctcatttgcagtgagtgctgtttatggtatttttgtttatgtatatgacaattctgttgtggaacagcattataatagtgttagcaaaaactgaccctgctctccagactcctatttattttttccttagcaacttttcctttttggaaatctgttatgtaacagttactatcccaagaatgcttatggatctatatacactaaaaggaaacatttctgtgtttgcctgtgcaacacaaatgtattttgtccttatgttgggagccacagagtgcctcttgctagcagctatggcctatgatcgttatgtgggctatctgccaccttctccaatat

SEQ ID NO: 913 - DNA, 504 bp, Mus musculus
  variation (390)...(410): Any nucleotide A, C, G or T
  MOR273-4P
atgcaatccaaatatgtgaacctacaaagagcaaacaaatttaaaatcacagacacaaatcttagtgtacctatagaatttgttctcttgggattttctgatattccccaattgcactggtttctctttggaatcttcttcttcatctacatgtctatccttctgggaaatggcctcatcattttaatcacaagagttgaacccactctgcaaacccccatgtactttttcatcagcaacctttctttcctagaaatttgttatgtttctgtcactcttcctagaatgcttatggatctcttcacactgaaaggaaatatttcctttcttgcctgtgctacacaaatgtgtttattccttatcctgggtggcactgaatgcttcctcctgnnnnnnnnnnnnnnnnnnnntatgatgatatgtgcctagtattagtgttaagtgttatgctttgtacagttgatatgcctgggaggtctgctccattcttaagggattcaaaag

SEQ ID NO: 914 - DNA, 907 bp, Mus musculus
  MOR211-5P
gcaagagaaattgctccttctctggatgaattcattttcttgggaattaccaataaccctttttatcacactcctacttgtttatctcattaatcttctggccaatcttgggatgatcatcttaactagagtggacactcagctgcacacacccatgtacttttcctcaggcacctctctttctgtgacctctgctattccacagcaattggacccaagatgctggtgaatcttttagctgaggagaaattcatttccacaggtggctgtgcactgcagttcttcaccctctgtgcctttgtagattctgagtgtctactgctggcagtgacggcctatgacagataccaggccatcagtaaccccttgctctacacagtgaacatgttcagccggctgtgctccctcctgatggctggggtttacctggtgggaacagcagatactttgatacatacaaccctggccttcagtttgtgtttctgtgacatcaaccaatttttttgtgatgttccatctcttgtactaatatcttgctcagaaacagaggtgaatgagtgagctatttccacaattttgtagtttattaactaaatataatttctggacttcttgtctcttactgttatatcatctcatcagtcttcaagatctgctctgctgatggaagtttcaaagctttctctacctatgcctcccacctgactgttgcatttttctgggaactctgctctttatgtatttccatctaaattcttcctactttctagatcaagacaaaataacatcattgttctacaccctggtgattctaatgttgaaccctctgatttaaagcctgaggaactaggacatgaaagaggctcttgagggctggtgagatggctcagtgggtaagagcacctga

SEQ ID NO: 915 - DNA, 911 bp, Mus musculus
  MOR261-7P
accaggacacggatcactgaggtcattctactgggattccaggttgacccctttctggagatgctcctgttcgggctgttcttgctgttcaactgcctcacgttgatgggaaatgggattatcctggggctcatctgcctggatgctaggctgcacacgcccatgtacttcttcctctcacatctggccatagttgacatgtcctacgcctccagcactgactgctcctaagatgctgacaaatatggtgatgcaccaaaaaagcatctcctttgcttcgtgcatacttcatacatttttgtatctggcttttgctgtgacagagtgtttgattctggtagtgatgtcatatgatcgctttgtagttatctgtcaccctttgaaatatacattaatcatgagctggagagtgtttgtcatcctggctgccacttgctgggtgtttagcttcctcttggcttcactcataccacactcattctacgactcccattctgtgggccacaaaatgtcaaccatttttttctgtcaaatcatgtcagtattcagattggcatgtgcagacacaagactcaactaagtcattctttttgcaggctctgtgatggtcttactggggtccctgtgcttggtgctggtctcctacactcgaatcctggtggccatcctggggatccactcggggtagggcctcagaaagaccttcacccgttcttcctgcctctgtgtagttgggctctttttttggttgtgccattgccaagtacttggcccacaaatctaatcactctcaagaagagagaaagatcctgtccttgttttacagccttttcaaccctatgctcaatcctctgatctacaatttaaggaacacagaggtgaaaggtgccttaagaagagctctttggaca

SEQ ID NO: 916 - DNA, 912 bp, Mus musculus
  MOR261-8P
atgaaccagacatggatcactgaggtcattctactgggattccaggttgacccctctctggagatgctcctgtttgggctgtttttgctgttctactgcctcacgttgatgggaaatgggattatcctggggctcatctgcctggatgctaggctgcacacgcccatgtacttcttcctctcacatctggccatagttgacatgtcctacgcctccagcactgactgcccctaagatgctgacaaatatggtgatgcaccaaaaaagcatctcctttgcttcatgcatacttcagacatttttgtatctggcttttgcagtgacagagtgtgtgattctggtagtgatgtcatgtgatcgctttgtagttatctgtcaccctttgaaatatacattgatcatgagctggagagtgtttgtcatcctggctgccacttgctgggtgtttagcttcctcttggcttcactccataccaagctcattctacgactcccattctgtgggccacaaaatgtcaaccatttttttttctgtcaaatcatgtcagtattcagattagcctgtgcagacacaagactcaactaagtcattctttttgcaggctctgtgatggtcttactggggcctctgtgcttgctgttagtttcctatacatgaatcctggtggtcatcctggggatccactcgagggagggccgcagaaactacatctctgtgtagttgggctcttctttggctgtgcaatctccatgtacatggtcccctagtccaaacattcccaagaacagagaaagatcctgtctttgtttcacagccttttcaaccctatgctcaaccctctgatctacagtttgaggaacacagaggtaaaagctgccttaagaagtgttctttggaaacagagatcactg

SEQ ID NO: 917 - DNA, 942 bp, Mus musculus
  MOR174-14
atggtgccaatggaaagaaatgtgagtgtggagattatcttctccctgttgggcttcacagactaccctgagcttcagatccccctttttctaatctttctcttcatgtacgttatcactgtagtgggaaaccttgggatgatagcactcatcaatatcaaccctaagttccacactccaatgtaattcttccttagccacctttcctttgttgacttctgctactcaaccatcatcacacccaagctgcttgaaaacttggtcctggctgataaaactatactttacttcagctgcatgtttcagtacttcctgtcctgtgtggctgtggtgtctgagtcctacttactagcagttatggcttatgatcgcttcgtggccatctgtaatcccttgctgtatactgtggccatgtcaccaaggctgtgcatcctgcttgtgactgggtcatatatctggagcatatttgctccattgattctcctttgctatgctctgcagctaaagttttcaagatttaatgtgatcaaccacttcttctgtgaatatactgccctcattgctgtctctagttctgatatacacattcccagcctgctactcttttgttttgcaaccttcaatgaagtgagtacactcttgatcattctcacatcttatgtgttcattttcgtgacggtattaaaaatcaaatctgccagtggacgtcgcaaagccttctctacctgtgcttcccacctgactgccatcacaatttttcacggaaccatactttccttatactgtatacctaactccaaaaactctaggcaagtcgttaaagtggcctctgtcttttacactgttgtcaaccccatgttgaacccactgatctacagcctaagaaacaaggatgtgaaggatgctttccagaaattagtgagcacaaagatccctcttcag

SEQ ID NO: 918 - DNA, 952 bp, Mus musculus
  MOR264-11
atgaatcatgaagagctagagtccatagacaatgtttccacagtgatacagtttgtgctcataggattttctgacctgcccaacctccaagggtttctatttgcagtgttttctgtagtttatattattatcttgattggaaatttcctcataatcataataatcagtatggaccaagcattacagaaaccaatgtattttttttctggcaaatttttcttctctggaaatctgttatgtatcagtgactgtcccaaggattctgttcaacattgggacacagaaccgaagcatttcactgatgtcctgtgccacacaaatgtccttcttccttgtttttggaactactgaaagtttacttctggctgtgatgtcttatgaccgctacgtggctatttgccaccctctgctctatcctctgatcatgaacccaacaaaatgcaaacagctggcagcagtctcctggcttggaggcatgccagtccagataggacaaacttgtcagatattctctatgaatttttgtaattcttacaaaatcaaccacttcttctgtgacataccaccaattctcaagctggcttgtggggacacttcagtgcatgaattgtctgtctatgtggtcctgatggtggtggctgcattcccttttatactggtgcttgcatcctacagcaaaatcattgccaccatccttaggttgccaacagccaaaggtcgggcaaaagccttctccacatgttcttcccacctcatggtggtactgttgttttatggatctgctacagttacctatttgagaccaaagtccatgcattcccctggtactgacaaactactctctttgttctacacggttgtgactcccatgttcaatccactgatatacagcctgaggaacaaagaggtgatttcagctctgaggaaattactttttaaaacatattactaa

SEQ ID NO: 919 - DNA, 931 bp, Mus musculus
  MOR177-12
atggaggttgggaactgttcagccactgagttccttttcttgggaattaccaataatcctgtgatcaaggtgattttatttaccacttttctaattgtctatctcattattcttattgaaaatcttggaatgataatttttgatcaggatgaaccatcagcttcacatcccaatgtactttttcctcagccacctctctttctctgatgtctgctactcctctgcagttggaccaaagatgttattggacctgcttgccaagagcagcaattcaattacttttcttggctgtgttcttcagttcttcatcttctgcatctttacagatgtggagtgtatgctgctggcaatgatggcgtttgatcggtacaaggcaatcagcaaccccttgctatatgcagtagatatgtccagcaaggtgtgttaccaacttctggctgtagtttacacagttgccattgtagatgctgtagtacacacaacattgacatttcgtttgtgtttctgtgggtccaaagaaatcaaccacttcttctgtgatttacctccactatacatgctctcctgctctgacatacaagtcaatgagcttgccttatttactgtttttggtttcattgaactgagcaccatctcaggagtacttgtctcttactgctatatcattctatcagtcctgaagatccgttctgctgagggcaggttcaaagctttctccacctgcacctctcatttaactgcagttgcaattttccagggaactatgcttttcatgtactttcggccaagttcttcttattctctagatcaagacaaaatgacctcactgttttacaccttggtgatccctgtgttgaaccctctgatttacagcctgaggaacaaggatgtgaaagaggcactccaaaaactgaaaacaaaaacttggttc

SEQ ID NO: 920 - DNA, 923 bp, Mus musculus
  MOR264-12P
atgaaacaggaagagctggagtccatagacaatgtttctacagtaatacaatttgtgcttttaggattttcttacctgcctatcctccaagagtttctatttgcagtgttttttgtagtttatattattatcctgattggaaatttcctcataatactagtaaccagcatggactctgcattacagaaacccatgtatttttttctagcaaacttttcctcactggaaatctgttatgtagaattcttttcgacattgagaaacaggacagaagaatttcactgatgtcctgtgctacacaactgtgcttcttccttgtttttggaactactgaatgtttgctgctggctgtgatgtcctatgaccgctatgtggccatatgtaaccctctgcactatcctctggtcatgaacccaacaaagtgcacacagctggcagcaggctcctggcttggaggcatcccagtccagataggacaaacttgtcagatattctccatgcatttttgtaattctaatcaaatagagcacttcttttgtgatataccaataattctcaagctggcttgtgggaacacttaagtgcatgaactgtctgtctatgtggaaggtgtagtggctgcattcccctttatactggtgcttacatcctacagcaaaatcattgccatgatcctgaggttgccaacagcccaaggtcgggcaaaagccttctccacatgctcttcccacctgctggtggtactgttgttttatggatctgctgcagttacgtacttgagaccaaagtccatgcattctcccgtaactgacaaactaatatctctgttctacaccactatgactcccatgttcaatcccttaatatacagccttaggaacaaggaagtgattgctgcactcagaaagttaatactaaaaaaa

SEQ ID NO: 921 - DNA, 696 bp, Mus musculus
  MOR40-9P
atggacaaagaaaactgttcttcgttgccagaattctttctcttgggtattagtagtaagtatggtgtgaaagtggttttgtttgtagtgttcctgcttgtttatctcactactctgctggaaaacataggaatgatcgcactgatcagaatggacccccagcttcacacaccaatgtatttcttcctcagccacctgtctttctctgatctctgctactccaccgcagttggacccaggatgctggtagacctagtagccgagaaacattcaattccttttactggttgttttctgcagcttttgtttgtctatgtctttatagatgttgaatgcatgctgctggcagtgatggcttttgatagatacaaggccatcagcaaaccccttctgtattctgtggacatgtccagcaaggtgtgctaccagtttttaactttaatttacctgacaagtactatagatggtttgatacatacaacactggcatttaatttatgtttttgtggctctactcagatcaatcattttttctgtgatttaccaccactgtacctcctttcctgttctgacacacaagcaaacgagctagttgtatttactctttttggtttcattgaactgagcacaatctcaagtgtcctggtctcctattgttacatcatctcatcagtcttgaagatcagctctgctggg

SEQ ID NO: 922 - DNA, 930 bp, Mus musculus
  MOR264-13P
gtgaaacaagaagagctggagtccatatacaatgtttccacagtgatgcagtttgtgctcttaggattttctgacctgcccaacctccaaggatttctatatgcattgtttttttgtagtttttattattatcctaatttgaaatttcctcataatactagtaacctgtatggaccctgcattacagaaatccatttatttatttctggcatacttttcctctctagaaatctgttatgtatcagttactctcccaaagactctgttctgcattgagatgcagtaccgaactatttctttgatgccctgtgccatacaactgtgcttcttccttatttttggaagtactgaatgttttctgttgactgggatgtactatgaccgctacatgtccatatgtaaccctctgcactatcctctggttatgaacccaaaaaattgcaaagagctggctgcagtctcctggtttggaggcatcccagtacagatagtacaaacgtatcaggtattctctatgcgtttttgtaattctaatcaaatataccacttcttctgtgacataccaccaattctcaagctgcatgtggggacacttcagtgcatgaactgcctgtctttgtggttgtttcagtggtggttgctctcccatttatactgttgcttacatcctccagcaaaatcattgccaccatcctgaggttgccaacagccaaaggtcgggcaagagccttctccacgtgttattcccctactggtggtactgttgttttatggatctgctacagttactagagaccaacatccttgtgttcctctagaactgacaaactgttctcactgttctatgcagttgtgattcctatgttaaatcctctgatatacagcctaaggaacaaggaggtgactgctgcactcagaaagttaatactc

SEQ ID NO: 923 - DNA, 697 bp, Mus musculus
  MOR264-14P
ctggagtccatagacaatgtttccacagtgatgcaattagtgctcttaggattttctgaatggccaacctccaagggtttctatatgcagcgtttattgtagtttatataattgtcctagttggaaatttccacataatactagtaaccagtatggacactgcattccagaaatccatgtatttttttctggcaatttttttcctctctagaaatctgttatgtatcagctactgattgatcagcatagttcagatagtacaaacatatcagatattctctatgcatttttgtaattctaatcaaatataccatttcttccgtgacataccaccaattctcaagctgccttgtgaggacacttcagtgcatgaactgcctgtctttgtggttgtttcagtggcctttgctctcccctttatactggtggttacatcttccagcaaaatcattgccaccatcctgaggttgccaacagccaaaggtcgggcaagagccttctccacgtgttattccccctgctgatggtactgttgttatggatctgctacagttactagagaccaacatccttgtgttcctctagaactgacaaactgttctctctgttctatgcagttgtgattcctatgttaaatcctctggtatacagcctaaggaacaaggaggtgactgctgcactcagaaagttaatactc

SEQ ID NO: 924 - DNA, 741 bp, Mus musculus
  MOR266-6P
ctatgttacactgcagtggtggtaccacacattttggccaacaactttcagtctgagaagaccatttctctgctgagctgtgccactcagatggttttcctcattggacttggtagtgctgattgcttcctcctggctatcatggcctatgacagatatgttgccatctgtcatcctttgcagtaccctctcatcatgactataacactttgtgttcgcttggttgtggcttctgtggtcattggcttgttcctgtccttacagcttgtggtctttatcttctgtctaccattctgtcaggacaggggaatagagcacttcttttgtgatgctccaccactgatgcgtctcgtgtgtgccacaagtcatatccatgagctctctgtgctaatggcagccacactagccattgctgtgcctttctttttcattgccaccacctatgccttgatagtggctgctgtgctcaaactccactcagcagctggccgtcacagggccttcaacacttgttcttcccacctcactgtggtattgttgcagtatggctgctgtgccttcatgtacttgcgccccgtctccagttaccatcccaagcaagatcagtttgtctccctggtatacacactgggtacaccattcctcaatcccctcatctacactctgaggaacagtgagatgaaaggggccataggaaaagtgcttaccagaaagtatctttcatggaaaatgataggatag

SEQ ID NO: 925 - DNA, 839 bp, Mus musculus
  variation (452)...(471): Any nucleotide A, C, G or T
  MOR212-4P
atggctaaggtgaatctcactttggtgacagagttcctcctcatagcattcactgagcatcctgaatgggggctccctcttttccacctgtttttatttatctatctcttcactttgctagggaactcaggcatgattgttttgatccgcatggatcgcaggctccacaccccaatgtacttccttctaagccacctctctttcatggatatctgttactcctctgtcactgttcctcagacaatggctgtgctgttggagcatggggcagctttatcctatgcacgctgtgttgctcagtttttcctgtttactttttttggatccatcgattgctacctcttggctctcatggcctacgaccgctatgtggccgtgtgccagcctttgctttatgtcaccataatgacacagaaagcccttactaagttttgtggtggggcttacattgnnnnnnnnnnnnnnnnnnnntggtgagagctatatccaggaattggtgattattgtgtttgccatttttgtcatcccctgcatgcatggtggtgattgtggtttcctacctgttcatcattgtggccattctgaggatcccttcagcaggaggccgggccaagaccttctcaacatgtgcctcccacctcactgcagtgtcactcttctttggcactctcattttcatgtacctgagagacaactctggtcaggcctcagaaaaggatcgagttgtgtctgtgttctacacaacagtaatccccatgttgaatcccctcatctacagtttgaggaacaaggaagtgaaggaagcactgaaaaattttctcaatagagtgaagactttc

SEQ ID NO: 926 - DNA, 876 bp, Mus musculus
  MOR256-33
ctctttgtgctggtgctgatctcctacctcctgacactggtaggcaacacagcgatcatcctcgtttcctgtttggattctgcgctccaaacacccatgtactatttccttaccaacctctctttcgttgatatctgcttctccaccagcattgttcctcagctgctgtggaacctccatggtccagccaagacaattactgccacaggctgtgctatacagctttatgtgtctctggctctggggtccactgaatgtgtcctcctcgcagttatggcatttgaccgctatgctgctgtttgccgaccacttcactatgctacagttatgcacccacggctctgccaatctcttgcaggagtggcgtggctgagtggagtgggcaacactctgattcagggcaccatcacccttcgcctgcctcgctgtgggaaccacaaaatttatcacttcatctgtgaagttcctgccatgatcaagttagcgtgtgtagacattcatgccaatgaagtgcagctcttcatggcttccttggtgctgctcctccttcccctgacactcatcttggtatcttatgggtacattgcccaagcactgatgaggttaaggtcagctctaacctggggtaaagctcttggaacctgtggatctcacctaattgtagtagtactattttatggcacaagcactgctgtctatattcatcctaacagctcctatgcacagagtcagggaaagtttatcacccttttgtatactgtggttattcctactctaaaccccctcatttacactttaagaaacaaagatgtaaaaggagctttgaagagactggtaaggaaagattctagcactggaaagaaaattctttcgagg

SEQ ID NO: 927 - DNA, 964 bp, Mus musculus
  MOR218-4
atgatagtggaaaatataaccacaatgagtggattcctcctcatgggattctctgacaaccatgagctgcagatcttacaggctttgctcttcttggtgacatacctagtcggctcagcagggaacgtcatcattatcaccatcacaacactagacccacagctccagtctccaatgtattactttctgaagcacctttccattctgggacctctcatccctctctgtcacagttccccagtatgttgacagttccctggcacaaagtggctacatttcatatgcacagtgcatgctgcagatttttttcttcacagcttttgcctggggtgagctggccattctcacagtgatgtcttatgaccgctatgtggccatctgcctcccattgcactatgaggtcatcatgagtcccagaaagtgcacttgggctgtggcaactgtgtggctaagtggaggtatctcaggaacattgtacataacaggtacactctttatcagattctgtggggacaaaattattcaccagttcttctgtgatgtcccccagttgctcaagctctcctgctctaatgaccaccttgtaataatggacatggttagtttcctgactgcagtttcctttgcctgtttcactgggattgtcatctcctatgtccacatattctccacagttctcaggatgccctctgctgaaagcaggtctaaggtcttctctacttgcctgccccatctttttgttgtctcattgtttctttctacaggcgcctttgcatatctaaacctaacctcagactcttcaactgctttagagttcttgctctctatcttttacacagtactacctccaactctcaaccctgttatttatagtctgagaaatgagacgataaagaatgttgtaaggaagttactgttgagcacaaaattcactgttagaatcattttttcctgttgtttctga

SEQ ID NO: 928 - DNA, 870 bp, Mus musculus
  variation (276)...(370): Any nucleotide A, C, G or T
  MOR249-1P
atggaaggaaagaatcaaacagctccatctgaattcatcatcttggggttcgaccacctgaatgaattgcagtatttactcttcaccatcttctttctgacctacatatgcactttaggaggcaatgtttttatcattgtggtgaccatagctgattcccacctacacacacccatgtattatttcctaggaaatcttgcccttattgacatctgctacactactactaatgtcccccagatgatggtgcatcttctgtcagagaagaaaatcatnnnnnnnnnnnnnnnnnnnnnnnnnnnnnnnnnnnnnnnnnnnnnnnnnnnnnnnnnnnnnnnnnnnnnnnnnnnnnnnnnnnnnnnnnnnnnnntgggtttctcaactcagtgttgcacaccgttctgaccttccacctgcccttctgtggtaacaatcaggatcaattatttcttctgtgacatacctcccttgctcatcttgtcttgtggtgatacttccctcaatgaactggctttgctgtccattgggatcctcataggctggactcctttcctgtgcatcatcctttcctacctttacatcatctccaccatcctgaggatccgttcctctgagggtagacagaaagccttttccacctgtgcctcccacctgctcattgttattctctattatggcagtgctatcttcacgtatgtgaggcccatctcatcttactcgctagagaaagacagattgatctcagtgctgtatagtgttttcacacccatgctgaatcctataatttatgcactgaggaataaggacatcaaagaggctgtgaaggccatagggagaaagtggcagccacctgttttctcttctgatatg

SEQ ID NO: 929 - DNA, 964 bp, Mus musculus
  MOR263-7
atgagtatcaactgctctctgtggcaggagaacagcttgtctgtcaaacgctttgcatttgccaagttctctgaggtccctggagaatgcttcctcctatttaccctcatcctcctcatgttcttagtatcactgacaggaaatgcactcatagcccttgtcatctgcaccaatccatccctacacaaccccatgtatttctttctggccaacttgtctctcctggagattggctacacttgctctgtcatacccaaaatgctacaaagccttgtaagtgaggcccgagaaatctctcgggagggttgtgccacacagatgtttttcttcacattttttggtataactgagtgctgtctactggcagctatggcttatgaccgctgcatggccatatgctccccacttcactatccaacacgaatgagtagtggggtatgtgcccatttggcaatagtttcatggggaatgggatgtatagtagggttgggacaaaccaattttattttctcctttggagttttgtggaccctgtgagatagatcacttcttctgtgaccttccacctgtcctggcacttgcttgtggcgatacatcccaaaatgaggctgcaatttttgtggcagcagttctctgcatatctagcccatttttgttgatcatttattcctatgtcagaattctggttgcagtgctggtgatgccttcacctgaggggcgccataaagctctctccacctgttcctcccatctacttgtagtcacaatgttctatggctcagcatctattacttacttgaggcccaagtctagccactcaccaggaatggacaaactcttggcccttttctacacagcggtgacatccatgctgaaccccatcatctatagcttaaggaacaagggaagtaaaggcagcactgagaaaaacactgagtctgaagaaacctctggcaataaatag

SEQ ID NO: 930 - DNA, 622 bp, Mus musculus
  MOR218-5P
atgtcttatgaccgctatgtggccatctgcctcccactgcactatgaggtcataatgagtccccagaaagtgcacttgggctgtggcagctgtgtggctaagtggaggtatctcaggaacattattcacagcaagtacactctctatcagattctgtggggacaaaattattcaccagttcttctgtgatatcccgcaattgctcaagctctcctgctctaatgatgactttggagtactggaagtgtctattttcatggctgtaatggcctttgcctgctttatggggattgctttctcctatggccagatattctctacagttctcaggatgccctctgctgaaggcagatctaaggtcttctccacctgcctgccccatcttttcgttgtttcattttttctctcaacaggcagttgtgcctatctaaagccaacctcagactcaccaactgcttcagacctcatgctctctatcttttacacagtattacccccaactctcaacccctttatctatagtctgagaaataagtccttgaaagaagctgtaaagaagttattgttaagtgaagaattagttgggaaaatttatgtttgttctgtttttagtgcctgctaa

SEQ ID NO: 931 - DNA, 936 bp, Mus musculus
  MOR136-15P
atgaggagtgataatgatagcactgtgtctgagctcattctcttggggcttcccattcagggcagaggatcaaggaatgtactgtgccctgttcctgaccatgtgcctgacaactgttctggggaatcttatcatcatcctgctcatcaggctgaactttcacctccacacccccatgtacttcttcctcagccacttggccttcactgacatttctttttcatcagtcacagctccaaagatgctcgtgaatatgctgacacacagtcagttcatctcttatgttgggtgtattttccagctatattttcttcaacatttactgatcttgacagttttcttctgacatccatggcctatgataggtatgtggctatctgccaccctctgcactatactatcatcatgagtcagaacctctgtatccttcttgtagttgtgtcctagactttatcctctgccaattcccttgtgtatactcttctcttggctagattttctcactttagaaacaataccaccccccactacttctgtgacctctctgccctgctgaagttgtctatctcagacactactatcaatgagctggtcatctttcctttaggtactgtggtcattgccctggctttcatatgcattctggtctcttatggccgtattggaatcactattctgaaaactccgtccatcaggggaatctgcaaagccttgtccacgtgtggttctcacctcactgttgtttctctgtactatggagccattactgggctatacctagtcccctcatctaataacactaatgacaaggatgtcattgtggctgtgatatatagcctggttacacctatgttgaatccctttatttatagtctgaggaatcaggacatgaaaaaaagcattgagaaatattctgagcaggagactgtgttcaca

SEQ ID NO: 932 - DNA, 534 bp, Mus musculus
  MOR136-16P
atgaggagagataatgagagcactgtgtctgagttcatcctcctggggctccccattcgagcagaggatcaagacatgtactctgccccgttcctggccatgtacctgacaactgtgctggggaacctgctcatcatcctactcatcaggctggactctcacctccacacccccatgtacttcttcctcagtcacttggccttcactgacatctctttctcatctgctacagctccaaagatgctaagaaatatgctgattcacagtcattttatctcatatgctgggtatgtttcccaggtatactttttcacttttttgaggagcattgacagcttccttctgatgtctatggcctatgacagatatgtggccatctgccaccctctgcactataccattatcatgagtcagagtctctgtgttcttctagtagctatgtcctggactttatcttttttttaaaatattttttttattaggtatttttctcatttacattttccaatgctatgccaaaattcccacataccc

SEQ ID NO: 933 - DNA, 946 bp, Mus musculus
  MOR159-2P
cttagggccactaaaaacaagacagaagtgactgaatttgtgttgttgggattgtccagtaggccagagatgcagccagttatttttggagttatcctacctgacagcagttttgggcaataccctactagtgcttgttgtttgctcagacccaaagcttcagacccccatgtacttccttctcagccagctttccttgattgccatatgtctaacaaccatcactgttcctcagatgctggtacacacactctctgcggttcgaaacatttcttataactgttgcatgacacaattatttttctttatggcagtgggcagcatggaaggccacttactggctgacatagcataggactactatgttgccatctgtgaccctttaagatattatgctattgttagccatagcctctgtctgcaaataacattgacctcatgggtgatggtcagccttaacagtctcctgtacagtgtgttggtcactcgtttaaccttctgtggcaacaaggtcactcactttttctgtgacatcactcctctgctgaagctctcttgtactcgaccagtgcttaatgaaatgctaatcttcactgagggtgctgctgtggtgggtagtcctttcttcttaatttggggttcttatgctcgaataggtattgccatggcccacatgcactcctttgctgccctgaagaaagctttgtctacctgtagctcccacattctgattgtgctgctcctttttggctctttggctagaatgtaccttaagccatcatccagctatgacttagaccaggatcaccaggttgccatcttctacatgctcatctcccctatgttaaatccactaatatacagccttaggaaccaagatgttaaaggagcactatggaggctttttaggaaactccatacttcagactggctcttagaaaaacaa

SEQ ID NO: 934 - DNA, 514 bp, Mus musculus
  MOR221-1P
cttaccatcatggcccaggaccgctatgtggccatttgcaaacctctcctcaaaactttcccagctgtccttctgtcactctaatgtggtccctcagttcttctgtgatattccttcattgctgaggctttcttgctctgatacctttaataacaaactcctaattcttctgtctgccattttggtcagtggtagctgctttgtctttattgtcatatcatatgttcgcatattatcaactgtgttgaaggttcctgtcaaaggagagagagggaaggccttttccacctgtgtccctcacattattgtggtgtctgtctttcttagttctgctgcttatatatatctaaaacctccagtggtaacattagaagtagctaaggagatgactctttctgtattctataccattgttcctccattcttaaatcctatcatctatagtcttagaaacagacagataaagaaggctgtgagtaaacttatatcaagaatttttttccttatttgaatg

SEQ ID NO: 935 - DNA, 952 bp, Mus musculus
  MOR219-3P
atgcccaatgacactagagtaacagggttcatccttatgggattctcagctgctcctgaactacagactgtatgtgggctgttctttctggtaatgtacctagcagtcataatgagtaacctgctcatcatcacggtcatcactctggatctgaaactccaaacacccatgtactttttcctaaagaatttgtccctgttggatgtcttccttgtgtccatcccaatcccaaagttcatcatcaataacctaactcacaacaattacatttcgattctgggttgtgcctttcagatacttttaatgacttcgttctcagcaggtgagatatttgtactgactgcaatgtcttatgaccgctatgttgccatttgctctcctctgtgttatgaggcaatcatgagtagtggtaactgtgtgctgatggtgggtgtttcctgggctactggaattctgtttggagctttatacacagctggcacattttcccatgcctttctgtggctccatggtgatcccacagtttttctgtgatgttccctcgttactaaggatttcctgctctggatcactcatgatcatttatataagtcttgggatcggtatgtgtctatgcatgtcttgcttttactgtgttatgatatcctacttttacattatctccactgtgctgaagattcctaccactagaggtcagtccaaagcatttgccacctgcatcccccacctcactgttttcagtgtttttattgccactgcttgctttgtctatctgaagcctccctcagatataccgtctattacagacagactgttttctgtgctgtatactgtgctgcctccagcacttaatcctgtgatctacagcctgaggaacagtgatgtcaagtgttctctgaggaggttgcagcaaaatctctgtcccagggattcatactacttaacagttcag

SEQ ID NO: 936 - DNA, 941 bp, Mus musculus
  MOR234-4P
atgcactttcagacaatggccaacacttccatagtgactgagttcttcctggaagtttttgctaaacttgggagctcagggtactactcagtgtgctgtttctgctggtgtatctgtgtagcctgttagggaacattaccatcatcattgttactacagttgaccagaccctgaaaacacccatgtacttcttcctcaggaatctgtccatcttagacatgtgctacatttccatcactgtccccagtgcctgtattaactctctcactgaccacaggaatatttctgtggctgggtgtgcagcacagatcttttcgttcttattttgtgcacttgtagagactctttttctttttcatggcccaggatcgttatgtggccatttgcaaacctctcctctatcctgtgatcatgaaccaccagttctgtgttcagatgacactggcttccctacttagctcacttgtcattgcaagtgtgcacactttcaaaactttccagctgtccttctgccactctaatgtgatccctcagttcttctgtgatcttcctgctttgctgagactttcttgctctgacaccttcaacaacaacctcttgatacttccgactgacattggagtcagtggtagttgctttgtctttattgccatatcttatattcgcatattatcaactgtattgaagattcccatcaaaagagagaggggaaagccttttctacctgtgtccctcacattattgtggtgtctgtctttgttagttctgctgcctatgtgtatctacgacctccagtaataacctttgaagtagttcaggaaatgattgtttctgtattttataccatggttccaccattcttaaaccctatcatctatagtctcagaaacaaacagataaaggaggctgtgaggaaagttatgtcacaagtttttccaata

SEQ ID NO: 937 - DNA, 978 bp, Mus musculus
  variation (57)...(76): Any nucleotide A, C, G or T
  MOR224-7P
atgacaaaccacactatggtgacagaattcaccttactgggcatccctgaaacagannnnnnnnnnnnnnnnnnnncttactgggcatccctgaaacagagggcctggagaatgtcctactcttcctgttctcaacattatatgcctgtgccctgctgggaaacttacttcttcttactgcagtcatctcttccccacaactccacacacccatgtactttttcttgggaaacctctccatctttgacatgggtttttgttccaccacagctccaaagatgttgtcatatctctcaggacagggtggagggatctctttccagggatgtgttgtacaacacttcttctatcattgtctgggttgcacagagtgcttcctatacacagtgatggcctatgaccgctttgttgccatatgcttccctttgagatacacaatcatcatgaaccacagagtatgctgtgtcttggccacagggacctggatgagtggctgtgtgcacgccactatcctaacttgcctcactttccagttgccctactgtggccccagcaatgtgggttattatttctgtgacatgcctgcagtgttacctctagcctgtgaggaccactctctagcacagagggtaggctttacaaatgttggtcttttatctctcatttgtttctttctcatccttgtgtcctacactcgaattgggatctccatctctaaaattcgctcaacagaaggcaggcagagagcattctccacatgcagtgcccacctcacagccatcatctgtgcttatggaccagtcattgttatctaccttcagcctaatcctagtccattgcttgggtgcagttattcagatattgaacaatcttgtgacacccaccatcaatccattgatctacagcctgaggaataaggatgtgaaagcagccctaaggcatgtgtttcttaagagaagtctcagtttggaaagtaaa

SEQ ID NO: 938 - DNA, 761 bp, Mus musculus
  variation (271)...(433): Any nucleotide A, C, G or T
  MOR171-30P
atgatagcaggaaactactccatggtgactgagtttatccttgctggattaacaagcacaccagaactgcagctgcctctcttcttcctcttcctcggaatctatgcagtaacgatggtagggaacctgggcatgatcacactgattctgctcagctcccacctgcacacacccatgtacttcttcctcagcagtctgtccttcattgacctctgccattcaactgtcattacccccaaaatgctggtgaactttggactgtgaagaacannnnnnnnnnnnnnnnnnnnnnnnnnnnnnnnnnnnnnnnnnnnnnnnnnnnnnnnnnnnnnnnnnnnnnnnnnnnnnnnnnnnnnnnnnnnnnnnnnnnnnnnnnnnnnnnnnnnnnnnnnnnnnnnnnnnnnnnnnnnnnnnnnnnnnnnnnnnnnnnnnnttttagtgctttcaatatccttttcccaacactgagtatcctgagctcttacatcttcatcattgccagcatcctccgtattaaatccactgaaggcaggtccaaagccttcagcacctgcagctcacacatatcagctgttgctgtgttctttgggtctgctgcatttatgtacctacagccatcatcagtcagctccatggaccaagggaaagtctcctctgtattttataccattgttgtgcccatgctaaaccccttgatctacagcctgagaaataaggatgtcaaggtcgcactaacaaaattttatgaaaaaagtttctca

SEQ ID NO: 939 - DNA, 797 bp, Mus musculus
  variation (230)...(249): Any nucleotide A, C, G or T
  MOR260-9P
atgggtgaagacaacagaacctctgtgacagaattcatcttcctgggcctctcacaggacccacagacacaagtcctgctcttcttcctcttcctcttcatctacctgctcactgtgctgggaaacctgctgatcatcgtgctcatccactcagaccccagactccacacccccatgtactttttccttagaaacctgtcctttgcagatctctgcttttctactaccannnnnnnnnnnnnnnnnnnnctgtctgcagcctctgcactactccaccatcatgtacacactgggtatgtgttcagctggctgcagggtcctgggccagtggtgcacttgtgtccctggtggataccacattcacattacgtcttccttatcgaggaaacaatgtcattaaccactttttctgtgaacctcctgccctcctgaagctggcatcggcagatacatacagcacagagatggcgatctttgcaatgggtgtggtaatcctcctagcacctgtctccctcatcctcacctcctactggaacattgtctctactgtaatccagatgcagtctggggaaggaaggctcaaggtcttctccacctgtggctcccacctcattgttgttgttctcttctatggctcaggaatatttgcctacatgaggcccaactccaagataatgaatgaaaaggataaaatgatttcagtgttctattcagcagtgaccccgatgctgaatcccatcatttacagcctgagaaacaaggatgtgaaaggggctctcaagagaataactacaaaa

SEQ ID NO: 940 - DNA, 807 bp, Mus musculus
  MOR179-4
ttggttgtattggtcatcgaggattcacggctccacaaccccatgtactattttctgactgttttgtcatccttggatgcctgcttttcttcagtactaactcccaaaatgttggccaatttcctttcaaaaaacaaatccatttcatttgctggatgtgcaacacagatgcttctctttgttacatttggaaccacagaatgcttccttttagcagcaatggcttatgaccgttacttggcaatctacagcccacttctgtatgcagtaagaatgtctccaagggtctatgtaccactcattattgcttcctatactggtggaattttacatgctacgatacacacagtggctacttttagcctttctttctgtggatccaatgaaattagacatgtcttttgtgatattcctccattgcttgcactttcttgttctgacacccacttaaatcaacttctgctcttctactgtgcaggctccattaaactaatcaccatcctcattgtcctggtctcttatggatttgtcctgttggccattctgaagattaattcagctgaaggaaggagaaaaatattttctacatgtggagctcacctaacaggtgtgtctatttttcatgggacaattcttttcatgtatgtgagaccaagttccaactacacacttgaacaagacatggtagtgtcaacattttataccattgtgattcccatgctgaatcccatcatctacagtttgagaaacaaagatgtaaaagaggcaatgagaaagttactcaagagaaaattggttcatgaatga

SEQ ID NO: 941 - DNA, 961 bp, Mus musculus
  variation (724)...(743): Any nucleotide A, C, G or T
  MOR0-6P
atggctgacagaaatctgactgtgataactgagtttatcctcctgggtctgaccgaggaccctgtactgaatactgtactctccgtgctgtgtctcttaatttatgtcattactgtagcaggcaatttgtggattattgtgataattttagctactgaccagcttcattcccccaagtacttttttcttacccacttggcttttttggatttctgctattcgtcagtctttcttcccaaaatgctgataaactacttagtaggacaaaacagcatctcgtaccatggctgccttctacagtattcctttgtcaacatgtttctgactgcagaatgcttcctcttggctgcaatggcctatgatcggtatcttgccatctgcagtccgctttactacagatgtcttatgactcccacgttttgcatctaccttgtgtcagcctcttacttgctgggctgtgccaactcacttacccacttgaggagtcttctcaatttgactttctgtgggcccaatgtcattgatcattatttctgtgacattccattgctttttcagctctcctgctctgatactcatgacagtgaggttttattcattgttctttctggtgctacatccataactacttttctgatagtaattagttcctatctaggaattcttatcactgtcctgaaaatacattctgccaggggaagttataaggctttatccacttgtnnnnnnnnnnnnnnnnnnnntgtgcgtcccacctaactgtagtaactctcttctatggaacagtgaatatcaacttacctgggaaccaggctcaagctttccacaggatacagaaaaaatcttatccgtgttttacacacttttgctgccagtactgaatctttttatatacagtgtgagaaacaaagaggccaaagaagccatgagaagaatgattaaaagaaaaatatttgctcgg

SEQ ID NO: 942 - DNA, 938 bp, Mus musculus
  MOR206-5P
atggacacttggaattacataaaagaatttgacttcatcctcatgggactgacagatccaaagagatacaacttgtccttgctatagtgttcctcatgatatacttggtcactgtgctgggcaacacaggcatgatgctgatcatttgtctagatgctcatcttcacactccaatgcatttctttctaacacatctgtcattccttgacctcatttattcaactgtcatcacacctaaaacctttgaaaacctcttcacttccatcaagaataattccttcatgggttgcatcacccagctgtacattttgttttgtttggtggtgctcaatgttttcttctctcctccatggcctatgactgctatgtagctatatgaaaccctctatactacctagctgttatgtccagaagacaatggcatgccttcctcattggttcctaccttatgggagctatagattcttctatcaatatgctttgtctaaacaggatggatttctgtgtctctcatgtcatcaatcacctttttttgtgacacacctacaattttagccctgtcctacagtgatacgtatgtcattgaaataataataatcattgtctttcgttcaagtctaatggtgtcccttctcaccatatcagtgtcttatgcatccattctctctaccatcttgaaaatcaattctatttcaggaaagcaaaaagccttttccacttgtgcctctcatctcctggcagtcaccatatcttatagtactgcaatcttcacttattcaaaatcaaagagattatactccttgggaaaggatcaagtggtttctgctctctacaccatcgtgatccccatgctgaatccactcatttacagtctcagaaacaaagaagtagaaaatgctgtcagtagagttataaagaaaagggaagactccaggtag

SEQ ID NO: 943 - DNA, 876 bp, Mus musculus
  variation (828)...(847): Any nucleotide A, C, G or T
  MOR196-5P
atgttaaggaaaaactacacagcagtgactgagtttgttttgctgggattgacagatcaagcagagcttcagcctgtgctctttgtggtattcctactcatctacctcatcacagtgattggtaacgtgagcatgatcttcttaatcagaagtgacagcaagcttcacacacccatgtacttcttcctcagccatctctcctttgtagatctctgttatgccaccaatgtcactcctcagatgttggttaactttttatcaaagagaaaaaccatttctttcataggctgcttcatacagtttcacttttttattgccctggtgatcacagattactatatgctcacagtgatggcttatgatcgctatatggccatctgcaagcccttgttatacacaagcaaaatgtccagaagcgtctgcctctcgctcgtagctgcaccatacatttatggatttgcaaatggcctggcacagaccatcctgatgcttcgtttaaccttttgtgggcccaatgagatcaatcacttctactgtgcagacccaccactcatggtccttgcttgctcagatacttatgttaaagaaactgctatgtttgtggtggcaggatccaacctcacctgttctctcaccatcatcctcatctcctacatttttatatttacagccatcctgcgaatccgttctgcagaagggaggcgcaaggccttctctacttgtggatcccatctgatagctgtcactgttttttatgggactttgttttgtatgtacctcaggcctccatctgagaagtctgtagagcaggggaaaattgtggcggtnnnnnnnnnnnnnnnnnnnntagacttgtcaaatgctttggtagtaagt

SEQ ID NO: 944 - DNA, 744 bp, Mus musculus
  MOR198-2P
atgtccctcacaaacatagaattcattttactagggctcacagatcgctcagaattccagcctctcctctttgtcctatttctgtttatttaccttgtcactgtgttagggaacatgtgcataatggccctgattagactggattcccaccttcacaagcctatatacttcttcctcagtaacttggcatttgtagatctgtgttatacctcaacagccaccccacagatattgaccaattgacaatttccttcattggctgctttccagtgctaccttctccccacatagttttatatgctggcccccatggcttatgatctctatgtggccatatgcaatcctctgcattacagcttgaaaatgtacaggcaagactgcatctgcttggccatgtgcccttatatctatggcttctcggatgggctatttcaagccatcttgactttaagtatcatgtcctataaatccagtgtcatcaaccacttctactgtgctgacccaccacttattaagctgtcttactctgatatttacataaaagaacatgccatgttaatatcagctggttttaatctctccaactccctgaaaatcatcctggtgtcctatgccttcattatggctgccatcttaaggatgaaatcagctggaggaaggcacaaatctttctcatcctgtgattctcacatgagggctgtcacattgttttatgggactctcttctgcatgtatgtaagacca

SEQ ID NO: 945 - DNA, 966 bp, Mus musculus
  MOR171-31P
atggctggaagcaatgccactgctgtgacagaattcattctcttggggtttgtagtccagagagaggtagaaatcattctctttctgatcattctagtgatctacactctgactttagtgggaaatgtagggatgatttcactaatcagtatggattctagactttcacactcccatgtactttttcctcagtaatctggcttttgtagacctttgctattcctcttcggtagcccccaagttcctggagactctcctcagtaacagaaggtctatatctttctatgcctgtgcaacccaactcggtttttttctgaactttttgatttcagagatgtttctccttgcagtaatggcttatgaccgctatgtggccatttgtaatcctcttctgtacatggtggtcatgtcccagaaggtatgcctacgacttgtaatgggcccttatttttacagctttgctgttgctttgctccacacagtagttactttcaaactgatttactgtggccccaatataatcaatcacttttattgtgatgatgtccctttgatggctcttgcctgctcagacaccagcctcaaggagattttaatattcattttgctggattcaacatgatcagttctttgaccactgtcctgatttcttacttatacattgtggctgctatcttaagaatccagtccacagaaggaaggtacaaagccttctcaacatgtgcttcccatctgactgctgtgactatattctatgggacactcattttcatgtatctgcagccaaaatcaagccactctctcgacacagacaaaatggcctcagtattctacacaattgtcattcccatgctcaatcctatgatctatagcttaaggaaccaggaggtaaagagtgctctcaggaaagctcttgaaaaatgctacttgttacctctaatgcacctcaagaaaggaatttcttga

SEQ ID NO: 946 - DNA, 516 bp, Mus musculus
  MOR256-34P
tacagctttgctgttgctttgctccacacagtagttactttcaaactgatttactgtggccccaatataatcaatcacttttattgtgatgatgtccctttgatggctcttgcctgctcagacaccagcctcaaggagattttaatattcatttttgctggattcaacatgatcagttctttgaccactgtcctgatttcttacttatacattgtggctgctatcttaagaatccagtccacagaaggaaggtgcaaagccttctcaacatgtgcttcccatctgactgctgtgactatattctatgggacactcattttcatgtatctgcagccaaaatcaagccactctctcgacacagacaaaatggcctcagtattctacacgattgtaattccaatgctcaatcctatgatctatagcttaagaaatcaggaggtaaagagtgctctcaggaaagctcttgaaaaatgctacttgttacctctaatgcacctcaagaaaggaatttcttga

SEQ ID NO: 947 - DNA, 549 bp, Mus musculus
  MOR227-8P
tttgttgtacgcagcaagatgtccagggttgtctgtatccgcctcatttctgtgccttatgtctatggattctctgtgagtctgatttgcactctgtggacatatggtttatatttctgtggaaacattaaaatcaaccacttctattgtgctgatcctcctctcatcaagattgcctgtggaggagtgcatatcaaagagcacacaatgattgtcattgctggcattaacttcacgtattccttgtcagtggttctcatttcatatgtgctcattgtagtagctgtgttacgcatgcactcagctgatggcaggagaaaggcattctctacctgtggatcccacttaacagctgtatccatgttttatggaaccctcatattcatgtatctgagaagaccaacggaggagtctgtggagcagggaaagatggtggctgtcttttataccagtgtgattcctatgctgaaccccatgatctacagtctcaggaacaaagatgtgaaagaagcagtctacaagatagttgccaaggcaaacttaaggaaa

SEQ ID NO: 948 - DNA, 462 bp, Mus musculus
  MOR262-13
tgcactctgtggacatatggtttatatttctgtggaaacgttaaaatcaaccacttctattgtgctgatcctcctctcatcaagattgcctgtggaggagtgcatatcaaagagtacacaatgattgtcattgctggcattaacttcacatattccttgtcagtggttctcatttcatatgtgctcattgtagtagctgtgttacgcatgcactcagctgatggcaggagaaaggcattctctacctgtggatcccacttaacagctgtatccatgttttatggaaccctcatattcatgtatctgagaaggccaacggaggagtctgtggagcagggaaagatggttgctgtcttttataccagtgtgattcctatgctgaaccccatgatctacagtctcaggaacaaagatgtgaaagaagcagtctgcaagatagttgccaaggcaaacttaaggaaa

SEQ ID NO: 949 - DNA, 815 bp, Mus musculus
  variation (275)...(466): Any nucleotide A, C, G or T
  MOR198-3P
atgcccctcacaaacagcactaaaatcacagaattcattttactgggcctcacagatcgcccagaactccagcctctcctctttgtcctgtttctgtttgtttatattgtcaccgtcttaggcaacatgggcatggtggctctgattagactggattcccgccttcacaagcctatgtacttcttcctcagtaacttggcatttgtggatctgtgttatacctcaacagccaccccacagatgttgaccaatttcttatcagaaaagaagacaannnnnnnnnnnnnnnnnnnnnnnnnnnnnnnnnnnnnnnnnnnnnnnnnnnnnnnnnnnnnnnnnnnnnnnnnnnnnnnnnnnnnnnnnnnnnnnnnnnnnnnnnnnnnnnnnnnnnnnnnnnnnnnnnnnnnnnnnnnnnnnnnnnnnnnnnnnnnnnnnnnnnnnnnnnnnnnnnnnnnnnnnnnnnnnnctcccttacaatcatcctggtgtcctatgccttcattattgctgccatcttaaggatcaaatcagctgaaggaaggcacaaggcattctctacttgtggttcccacatgatggctgtcacattgttttatgggacactcttctgcatgtatgtaagaccacctactgacaagactgttgaagaatccaaaataatagctgtcttctacacctttgtgagtcctctgctgaatccattgatctacagtctgaggaataaagatgtaaagcaggccttgaaaacaatactcaggcaaaacgtcatcaggacagcattgatgcgtccaccttccaacaaactgcaacaataa

SEQ ID NO: 950 - DNA, 942 bp, Mus musculus
  MOR175-6
atggaaagaaagaatcagaccacagtgcttgagtttcttttcctgggccttacagattatctccatcagaaggttgttctcttcatcatatttttccttgtgtatcttgtcaccctggcaggtaatgtgggtatgatcaatctcatatgggtagaccccaggctgcacacgccaatgtactttttcctcagccagctggcctttgtagatgtgtgctcctcttcctgtgtagctcccaagatgctgagtgacatttttgcagagaagaaagccatttcttttatgggctgtgcagcacagatgtggttctttggtctttttgtgacaactgattgtttcctcctagctgccatggcttatgattgatatacggctgtctgcaaacccttactgtacagtgtcattatgtccaagagggtctgtgttcagtttgtcataggaccttatcttttagctgctataaacatcacaactcatacaacattgaccttttgcttaccgttctgtggttcaaataccatcaaccatttcttctgtgatgtttccccactgctttcattagcatgtgctgacacatggattaacaaggtagtactttttgtcctggctggagtgataggtgttcccagtggcttgataatcatagtttcctatgtgtgcatcctggtggctatcttgaagatcaagactgctgatgggagacagaaagccttctccacgtgttcttctcacctggcagctgtctcaattctttatggcactcttttcttcatatatgttcggcctaatgcaagttcttccctagatattaataaagtgatctctttattttatacggtggtgatccccatgttgaatcccctcatttatagctcgaggaacaaagaggtgaaagatgcagttaagagaatattgagaagtaatcacttcttaacaggtgct

SEQ ID NO: 951 - DNA, 884 bp, Mus musculus
  variation (284)...(303): Any nucleotide A, C, G or T
  MOR213-7P
atggatgaggaaaatattactgaagtgacagagtttattcttttaggattcacagaagatgcggtgttacagcaagtactctttttcatcttccttaccatttacatcatcagtctgctagggaatattactctgatttctctcatctgtgctgattcacgactccatacacccatgtatttcttcattggaaacctgtcatttctggatctgtggtattcttctgtctatgctcccaaaatcctgataacatgcatcactgaagacaaaagcatctcctttgnnnnnnnnnnnnnnnnnnnngcttatgatcgttatgtggccatctcccaaccccttgctttacttcccaggctatgtctccaaggttacgtgccagtcttgttgcagcatcctatcttggtggctttgcaaactccaccattatcaccagtgagacatttaccctgagtttctgtcgagacaatatcattgatgacttcttctgtgatctgcctcctcttgtgaagttggcatgtgatgtgaaagagagctaccaggctgtgctctatttcatattggcttctaatgtcatcactcccactgtgcttattttggcctcctacctcttcatcattgtagccatcctgaagatccgctccacccagggccgcctcaaggccttctctacatgtggttcccacctgacagctgtcactttgtactatggttcaatcctctttatttactcccggccaagcacaagttatgccctggagagggacaaagtggtgtcagtgttctatactgtagtgattccaatgcttaaccctatgatctacagcttacgaaataaagatgtcaaggatgcattgaggaaaatgttagacatagtcaagttgtca

SEQ ID NO: 952 - DNA, 459 bp, Mus musculus
  MOR213-8
actgcaaacaccttccagctaactttctgtggtgaaaatattattgaccactttttctgtgatgcaccacccttggtaaaaatgctctgtacagatacccgtgtctatgaaaaagtcctactgggtgttgtgggcttcacaatgctctccagcattcttgccatcctcatttcctacttcaacatcctgctggctatcttgaggatctgctcagcctcaggaagacataatgctttctctacctgtgcctctcacctggtctccgtcatgctgttctatggtcccttcctgttcatgtattcaaggcctagttcaacctactctctagaaaaggacaaagtggctgccctcttctacactgtagacaacccattgttcaaccctctcatctatagcctaagaaacaaagatgtcaaaggtgccttcaggaaagcatcacagacaatacaaccacacaca

SEQ ID NO: 953 - DNA, 948 bp, Mus musculus
  MOR175-7P
atgaaagataagaatgagaccacagtgagtgagtctctatttctgagcctcacaaatcgtctctatcagaagagtatacttttcatcctgtttctctttgtttatcttgtgacactggggggggcaacttgagtatggtcactctaatatgggtggaccccagacttcatactcctatgtacttttttcttagccatttgtcttttgtagatatgtgttcctcttcttccatagctcctaggatggtgtatgatatatttacagaggaaaaaataaaacatttctttttgggttgtactgtacagttatggtttgctggtctttttgtgggaactgggtgtttcctcctagctaacatggcttatgaatggtatacagccatctgtaaacccttactgtatactctaattgtgtccaaaagtgtctgtacacagtttgtcattgggccttatcttctggctgctataaacatcacaactcatgaaaccttgaccttttgcttaccattttgtggtcccaatactatcaacatttcttctgtgatatttccccaatgcttgtcttaccatgtgctgactcctccatcaacgagatagtgatttttgtcttggatggaacaataggaatgcttagtgatctgatcatcacagtctcctacatctctatttgatggccatcttgaagatccagaccactgatgagaggatgaaagacttctcttcttgttcctctcacttggcaggtgtctctatccagtatggaactgtgttcttcatctatgttcaacctagtacatatacttcactgaacacgaataaagttatttctctattttatactgtcatgatttccatgctgaatcccctgatctatagcttgaggaacaaggaaatgaaaaatgcactcagaagaaaagtacaaaggaaacatttttcaagagattggtaa

SEQ ID NO: 954 - DNA, 961 bp, Mus musculus
  MOR153-1
atgtactttcttagcatcatcaacatcatgaagagaggaaacgtttcagaatctacagaattccatctcatgggattatcagataaccaagaactacagcctgttcttatttggagtcttcctgaccatatatctgatcacactgtttggaaaccttctcataatactggctacaatttttgattcgaatctccacaccccaatgtatttcttcatttccaacctctctttcattgacatatgtttcaccaccaccaccatcccaaaaatgctggtgaacatacaggctcaggtcaactcaatcagttatacaggctgcctcactcaaatctgctttgttctagcgtttgcaggattggaaaatgaaattctggtaatgatggcctatgacaggtttgtggctatctgtcatccactgaggtacacagtcatcatgaatcccaaactctgtggggtgatggttttgttgtccttgctaagtatcctagatgcactgctccacactttgatggcactgcgtctgtcattctgcacaaagttggaaattcctcactttttttgtgaactggctcatattctcaagcttgcatgttccaatattcttatcaataatattctggtgtatttggtgacaagcctgtttggtattcttccactgtctggtataatttactcttataccaaaattatctcatctgttttgaaaattccatcagctgcaggaaaatacaaagtattctccacatgtgtatcacatttagtagtggttatcttgttctatgggacaggttttggtgtttatttaagttctgctggcactcatagctccagaatgagtgcaatagcctctgtaatgtacacagtagtcactcccacgatgaatccctttatatacagcttgaggaataaagacatggtcaacgctttcaagaaactcatctctagaataacaacttccctt

SEQ ID NO: 955 - DNA, 937 bp, Mus musculus
  MOR153-2
atgaagcgaggaaacgtttcagaatctacagaattccatctcatgggattatcagataaccaagaactacagcctgttctttttggagtcttcctgtccatatatctgatcacaatgtttgggaaccttctcataatactggctacagtttttgattcgaatctccacaccccaatgtacttcttcatttccaacctctctttcattgacatatgtttcactaccaccaccatccccaaaatgctggtgaacatacaggctcaggtcaactcgatcagttatacaggctgcctcactcaaatctgctttgttctagcgtttgcaggattggaaaatggaattctggtaatgatggcctatgacaggtttgtggctatctgtcatccactgaggtacacagtcatcatgaatcccaaaatctgtggggtgatgggttttgttgtccttcttgataagtatcctagatgcactgctccacactttgatggcactgcatttgtcattctgcacaaaggtggaaattcctcactttttttgtgaactggctcatattctcaagcttgcatgttccaatattctcattaataatattctggtgtatttggtgacaagcctgttgggtgttcttccactgtctggtataatttactcttatactagaattatctcctctgttttaaaaattccatcagctgcaggaaaatacaaagtattctcgatatgtgcatcacatttagtagtggttatcttgttctatgggacaggttttggtgtttatttgagctctgctggcactcatagctccagaaagagtgctatagcctctgtgatgtacacagtggtcactcccatgatgaatccctttatatacagcttgaggaataaagacatggtcagtgctttcaagaaactcatctctagaataacaacttccctt

SEQ ID NO: 956 - DNA, 355 bp, Mus musculus
  MOR154-2P
attgaattttactttgtattttcagtgctcttactggaaagatgcaattcagaaaccaaacagctttttttagaatttcatctccttggacttacaaatgatcctgaactagagcccctaatatatggtattatttcggtgattatatcttttcacaattctggggaacatagtaatcctcctggcgatcttctcagattcccacctccacacccctatgtacttctttttatccagactgtctattaatgacgtgtgtttaagcataagtactatccccaaaatgttggtaaatagtcaagcacaggataacaaaatcagttatatacaatgtatttctcaaatctattttgtc

SEQ ID NO: 957 - DNA, 536 bp, Mus musculus
  MOR266-7P
gtaatctccttcttagtggcagcaaggtcaaaatctggatcagcctgcttcaaggtccacagtctgatggtgttgcagctgtctttcggcacaaacttggaaatacataatttcttctgtgaacttgctcaggtcctgaatcttgcctgttttgataccttcattaataacttacttatacttgttgcagttttcatatttatgagtggtcaagtctgtggagtcatcttttcatatacttacattttgttgtcagtcttgagaatgacatcccaaacaggaaagaaaaaagccttttccacttgcacatctcattatgtctgttatattcttgttctatggatcctgtcttggtgtgtatttcagctcctcagtagctgaatttacaagacattcagcagtggcgtatgatgtacactgtagaccctcagatgctgaacccctttatctacagtctaaggaatagacatgaagaaagcctttcagaaatccattggttggacatcttaggttcgcctctgtgttcattgatataa

SEQ ID NO: 958 - DNA, 927 bp, Mus musculus
  MOR146-4
atggaactttgtaatgtaacaagtaccttggaattccttttacttggtctctcagaggaccctgaactgcagcctgtcttatttgcactattcctgctcatatacctgctcactgtgcttggaaatgtgctcatcatcttggccatcagctctgattcccacctccacagcccaatgtacttcttcctctacaacctttcattgtctgacatgggcttcagcagcaccaccatccccaaaatgctgataaacacgcagacccataacaaatccataacttatgctgcctgtctaactcaggtgcctttcttctttctttttgggtgtatggacagcctcttactgactgtgaaggcctgtgactgatgggtagccatctgctattctctatactaccaaataattttgaacccttgcctatgtaaatgtttggtcatagtgtcattttttattagccctatggattcacaggtacacttcttcatggtgtcacaactaaaattttgcactaatttagaaatccctcacttcttctctgatggtacagagattctaaaacttgcatgtactgacattactatcatcaacatagccatatttcttgtcaacatcattgctgggtttctccctgccttaggaatcttttactcctactataaaattatttcctccattgttagggttctatcgtcattacagaaatataaagatttctctacatgtggattccacctgtcagttgtttgcttattttatcaaacaggtataggtgtgtaccttagtacatatatttctagttcttccaaggaatgtgtggtggctttggtaatttatacgatggtggttcccatgatgaatcccttcatctacatcctgaggaacagggacatcaagaataacctccagaaaatttttactcaaataaaa

SEQ ID NO: 959 - DNA, 968 bp, Mus musculus
  MOR146-5P
atggagtcatataatttaacaagaactttggaattccttctccttggactctcagaagaccctgaactacaacctgtcttatttgtactattcctgctcatatacctgctcactgtgcttggaaatgtgctcatcatcttggccatcagctctgattcccgcctccacagccctatgtactttttcctcttcaacctttcattgtctgacatgggcttcagcagcaccaccatgcccaaaatgctggtaaacatgcagactcataagaaatccataactcattctgaatgcctaactcaggtgtctttcttctttctttttggcgatatgggcggcctattactgactgtgatggcctatgaccgatgggtggccatttgtcaccctctgcactaccaagtcattctgaacccttgtctgtgtagatgtttggtcatagcttcatttttcattagtcttgtgagttcacaaatacactgcttgatggtgtcacaactaacattttgcactaatatggaaatccctcatttcttctggatgttacagagcttctaaaacttgcctgttctgacacctctatcaacaatatagttaggtttcttttaagcatcattcttggtttcctccctgtctcaggaatattttattcctactataaaataacttcctccatttttaaagttccatcactgttaggaaaatataaagccttctctacctgtggctctcacctctcagttgtttgcttattttatggaacaggtataggtgtgtaccttagttcaacagtttctagttcttccaggaaaagtgtggtggcctcagtaatgtatacaatggtggttcccatgatgaacccctttatctacagcctgaggaacagggacatcaagaaagcccttcacaaaattgtcaaacaaataatgtagtataactacctgaatgatcccttaatatatagtttttaa

SEQ ID NO: 960 - DNA, 585 bp, Mus musculus
  MOR108-3
atgtcctatgatcgctatgtggctatttgcaagcctctgcactatacaaccatcatcagtaacaagatctgccaccagctcatcatcagctcctggctggctggtttcttggtaatttttcctccactggccatgggtttagagctagatttctgtgactccaacattattgaccacttcacttgtgactctgctcctttgctgcaaatatcctgcacagacacaagcaccttggagctcatgagctttatattagctttgatcacgcttatgaccaccctgatgctgataattctttcttacatatgcattctcagaacaattctgaaatttccctcagccaaacaaagggaaaaggccttttcaacctgctcctcacatatgattgttatctccatatcctatggaagctgcatcttcatgtatgtgaaaacatctgccaaggctggagttgctttaacaaagggggtggctatgctcaacacctctgttgctcccatgctgaatccttttatttacactttaaggaaccagcaggtgaaacaagcatttaaggaccttgtaagaagaaaacttgcctcaaaa

SEQ ID NO: 961 - DNA, 937 bp, Mus musculus
  MOR111-10
atgaaaaaccattctgtgattactgagtttgtgctcctgggcatatcagacgatccagaagtccaggttgtgatttttatccttttattcattgcttacatattaagtgtcactggaaacctaaccatcatcattctcaccttgctagactctcagttaaagactcctatgtatttcttcctccagaatttctccttcttagaaattatattcaccagtgtttccatccctagatttttggagtcaataattactaaagtcaagacaatttcctataacaactgtttggctcagttatatttcttcatctccatgggagtgtctgagttctttcttctaactgctatgtcttacgatcgttatgttgccatctgcaagccactgcactacaccctcatcatgaatcagaaagtctgcacccttcttgtccttgcctcatggctggcaggattcctgaccatctttccaccattaatgttggtcctcaagctggacttctgtgcttctaatgtcattgatcacttctcctgtgactacttccccattctacagctctcctgctcagatacaaggagtttagagatgattggcttttactttgcatttattactctgctgttcacactggctgctagtgatcttgtcatatatctccatcatcagcaccattctgaggttcccatctgccagtcagaggaaaaaggctttctccacttgttcctctcatatgattgtcatctccatctcttatggcagctgcattttcatgtatgtcaaaccttctgcaaatgaaagggcatcactgaccaaaggggtggctgttctcaatacttcaattgctcccatgctgaaccctttcatttactcgttgagaaatgaacaagtaaaacaagccttcaaggatttgattaataaagtagtactttatagaagcaaa

SEQ ID NO: 962 - DNA, 946 bp, Mus musculus
  MOR110-7
atgaaaaatcagtcaatggaacttgacttcattcttttgggattgacagatgacccacagttgcaaattgtggtttttctgtttctctttctcaattacatgatgagcttggtggggaacttaatcattgtgcttctcaccctgctggaccctcgcctcaaaaccccaatgtatttctttctccgtaatttctcctatctggaaatcatgttcacaacagtgtgtattcccaaattcttgacagccattgtgactggagacaaaactgtttcttataataattgtgcaactcaattgtttttctatcttttgctgggagtcacagaattttatctcctggctgccatgtcctatgaccgctatgttgccatctgcagaccactgcactaccctatcatcatgaacagcaaagtgtgccaccaactcgtcctcagctcctgggtgactggattcttgatcatctttcccccattggccatgggtttgaagctggatttctgtgattccaggataattgatcatttcatgtgtgaaacttctcctattttacagatctcctgcacagacactcatgttcatagaaatgatgtcctttgtcttagcagtggtgacacttgtagtcacactggtactagtgagtctctcttactctttcatcattaagactattatgagtttcccttctgcacagcaaagaaccaaagccttctccacctgcacttcccacatgattgttgtctccataacatatggaagttgtatcttcatgtatattaaaccatctgcaagggagagagtgtctgtgtctaaaggtgtagctctgctgtatacttcaatcgcccctctcctgaatcctttcatttatacactaagaaaccagcaggtgaaagaagtcttctgggatatattacgaaagactttgggctttttaaaaaacaaagtttaa

SEQ ID NO: 963 - DNA, 435 bp, Mus musculus
  MOR113-5
ttctgtgcttcaaatgtcattgaccatttcctttgtgatgtttctcctctcctacaactctcttgctcagacacaagtttactagaagtgatggctttcatcttagctctcatgacactcattgtcacattaataatagtcatcctttcttatgctcacattgtcaagacaattataaaattcccttctgctcagcaaaagaaaaaggccttttccacttgttcttctcacatgattgttgtttcccttacttatgggagttgcatattcatctacataaagccttcagcaaatgaaagagtgactttgagcaaaggaatagctgtgctcaacacttcagttgcccctttgttgaacccatttatttatacactgaggaataagcaagttaaacaagcctgtggagcaatacttagaaaaatattttctgcttca

SEQ ID NO: 964 - DNA, 940 bp, Mus musculus
  MOR256-35
atgagtgtggccaatgagagcatctcacgggagttcattctcttagggttttcagatcggccatggctggagctgccgctctttgtggtgtttctagtgtcctatattctgaccatctttggaaatatgatgatcattcttgtgtcccgcctggattccaaactccacacccccatgtactttttcctcactaacctgtccttgctggacctgtgctacaccacaagcacggtcccacagatgctcatcaacatctgcagcacccggaaggtgatcagctatggtggctgtgtggcccagcttttcattttcctggccttgggttccacagaatgctttctgctgggcgtcatgtcctttgacaggtttgtagccatctgtcggcctctccactactcagtcatcatgcaccagaggcgctgcctccagttggcggctgcatgttgggatcagtggcttcagcaactcagtattacagtctacgtggacccttcagatgccactgtgtggacacaaggaagtggaccatttcttttgcgaagtccctgccctgctcaagttgtcctgtgtggatacgacagctaatgaagcagagctgttcttcatcagtgtgctgtttcttttaatacccgtgaccctcatcctcatatcatatgcttttattgtccaggcagtgttgagaataagatcagctgaaggtcggcgaaaggcatttgggacatgtggctcccacctcatcgtggtggtccttttctatggcactgccatctacatgtatctgcagccaccatcccctacttccaaggaccgggggaaaatggtgtctctcttttatgggatcatcacacccatgctgaaccccctcatctacacactcaggaacaaagaggtaaagggagcgttcaagaggttggtgacaaggatcatcctgagtagaaaa

SEQ ID NO: 965 - DNA, 944 bp, Mus musculus
  MOR256-36
atgaacagagctaatggcagcatcttttctggatttattcttctgggcttctccaacaggcctcagctggaaacagctctcttcttcgctatgttgctcatctatttcttgagcttcctaggcaacagcaccatcatattgctgtcagttatagaccctcatctccacacccccatgtatttcttcctttctaatctctcctttatggatctttgtttgacaactcgcactgtccctcagacgctgtttaacttcaaggggaaggacaagaccatcacttatggtggctgtgtgacccaactcttcattgccctgggacttgggggagtagagtgtatactcttatctgtgatggcttatgatcgctatgctgctgtctgccgaccactccactacatggtaatcatgcacccacagctttgcataaagatggttataactgcttgctcacagggtttggcaattctgtggtacagacagcattgaccatgagtcgtcccctctgtggcagaaatcaactggaccatttcttctgtgaagttccagtgatgctgaagctaacctgtgctaactccttcattaatgaagctgaactctttgctgtcagtgtcttcttcttggtggtacccctctcactcatattagtgtcctatggctacattactcatgcagttctaaagatcaagtcagcacagggaaggcggaaggcctttggaacctgtggctctcaccttctggtagtgattatcttttttggcacactcatttccatgtacctccagcctccctccagttactcacaggacgtgaacaaaagcatggcacttttttatactctggtgactcctctgttgaatcccctgatttacacactgaggaacagggaagtcaaaagtgcattaaggagaataatgggtagaaggacagattcgacaaagagttaa

SEQ ID NO: 966 - DNA, 693 bp, Mus musculus
  MOR222-4P
atgtccaatcacacaagagtgactcacttcatcctcaggggcttctcagatgtcccacagctgagattggtgctcatcccatttttcttgttcttttacactttcggcatcctggggaacttctccatcatcacggctgtgacaagagacagtcgactccactctcccatgtacttcttcctgaagaatctgtctttcctggacatttgctacacctcagccaccatccccaaggcagtggtgatatccctcacaggctcaggggtcatctcctatcaagagtgtgcagcacagctctacataatttttacatttgcatgtacagaatgctttctactcacggccatggcttatgaccggtgcctagccatcctcagaccactgatctatggaaccatcatgagccagaaatattgttctgcattggtggtcactgcctgggtgggtggggctatctactcagccttccacacattcaacaccttctccctcccctactgtggacccaatgttattgatcacttcttctgtgacatgccaccagtcatgagactgtcctgcactgactaccatctcactgaggaggtgggctttgctgtcagtagttgcattgtcatgagctcatttgtcctcacagtggtctcctatattggcattgtggccacagttcttcgcatcccctcagtagaaggc

SEQ ID NO: 967 - DNA, 924 bp, Mus musculus
  MOR285-3P
atggagtcaggaaaccgcagctgtgggacagacttcaccttggttggtcttttccaggatggacacatggacaccttcctcttcacagtcatctccatcctctttgcagtggctctcataggcaacatcacactggtcatcctcatcaggctggaccaaagactccacacccccatgtactttctcctcagccagctctccatcatggacatgatgtacatctccaccactgtgcccaagatggcagctaacttcctctcagacaccaaggccatttcctttctgggctgtgtgatccaaaccttttgtgtttctgaccctgggtggggtctgaagccctcctgctgggctttcatgtcctatggacaggtatatagccatctgccgacccttgcactacccctgtgttcatgagcagggaagatctgctgctccatggtcgctggtgcctggagcagcagctccatcactgcatcagtgcacacagtgtatgtgtttcaacttccattctgtggctctaggatggttaaccactttttctgtgaggttccatctctcctgccactggtgtgtgaagacacgtcccagtatgagcatacagtcctcgtgagtggacttgtcattctgatgctccccttcctggccatcctagcttcctatgctcggatcttggttgttgtactccagatgggttcagggcagggacagagtagagctgtgtccacctgctcctcacacctgactgtggccagcctgttctatgtcaccactctctccacctacacccagccacacaccttgcattctcctggaagggacaaagtggtggctgtgctctactcaatcgtcacccctgttctgaacccattcatctacagcctgaggaacaaggaggtcatgggagccctgaggagacaaatgaaa

SEQ ID NO: 968 - DNA, 921 bp, Mus musculus
  variation (396)...(812): Any nucleotide A, C, G or T
  MOR256-37P
atggacccaagcaattacagtactttgcatgtttttatcctgcttggattctctgaccaccctcacctggaaatgatcctctctggagttgtcaccttcttttacattattacactggtgggtaacactgctataattcttgcatccctcctggatccccatctccatacaccaatgtactttttcctcaggaatctatctttcctggatttgtgtttcacaacaagcattgtccctcagatgctggttaacttgtggggacccgaaaagaccattagctctgtgggctgtattgttcagctctatgtgtatatgtggctgggctccattggagtgtctgctcctagctgtcatgtcctatggatcgtttcacagctatttgtaagcccttgcatnnnnnnnnnnnnnnnnnnnnnnnnnnnnnnnnnnnnnnnnnnnnnnnnnnnnnnnnnnnnnnnnnnnnnnnnnnnnnnnnnnnnnnnnnnnnnnnnnnnnnnnnnnnnnnnnnnnnnnnnnnnnnnnnnnnnnnnnnnnnnnnnnnnnnnnnnnnnnnnnnnnnnnnnnnnnnnnnnnnnnnnnnnnnnnnnnnnnnnnnnnnnnnnnnnnnnnnnnnnnnnnnnnnnnnnnnnnnnnnnnnnnnnnnnnnnnnnnnnnnnnnnnnnnnnnnnnnnnnnnnnnnnnnnnnnnnnnnnnnnnnnnnnnnnnnnnnnnnnnnnnnnnnnnnnnnnnnnnnnnnnnnnnnnnnnnnnnnnnnnnnnnnnnnnnnnnnnnnnnnnnnnnnnnnnnnnnnnnnnnnnnnnnnnnnnnnnnnncactccaagtctcaaccccctcatttacaccctaaggaacagagacatgaaagatgcactgaaaaaactcatgaggttttaccacagatttgccgaagtaaggagaaac

SEQ ID NO: 969 - DNA, 934 bp, Mus musculus
  MOR174-15P
agtatctatgaaaaccagagttctacagtgacattcatcctcgtgggcttctcagaatacccagacatccagttgcccctgttcctcctgttcctgaccatatacacagtcactgcgctggggaacctgggcatgattgccatcatcagacttagccctaagctccacactcccatgtatttttttcttagtcatctctcctttgtggatttctgttactccactgttgtcacaccaaagctcttagaaaacttgattgtggaagacagaaaagatctccttcacaggctgtgtcatgcaattcttctttgcatgcatatttgtggtgacagaaacattcatgttggcagtgatggcctatgacagatttgtggcagtatgcaaccccctcctctacacagtggctatgtctcagaagctttgctggtccctggtagcaggatcctattcatggggtataatctgttcctttgtattcatacgttttatgttgaccttggtcttctgtgggaccaagttcataaataactttgtgtgtgagcatgatgccattgtcgctgtatcctgctctgacccctacattagtcagaaggtcattttcatctttgcaactttcaatgagctaagcagtctgatgatcattctcacctcttatgttttcattgtcatcactgtcatgaaaatgcctaccactggagggcgctacaaagtcttctccacttgtgcctcccatctcactaccatcactattttccatagcattatcatctgtctctactgtgttcccactaccaaaagttcttggcttttggtcaaggtggcttcagtcttctacacagttgtcatccccatgctgaacccactaatatacagtctcaggaacaaggatgtgaaggatgcagttaagaaactaatgtgttcttctttgtcatca

SEQ ID NO: 970 - DNA, 814 bp, Mus musculus
  variation (261)...(280): Any nucleotide A, C, G or T
  MOR225-8P
atggaatgccagaggaacatatcagaatttcttcttatggggctatcttccaagcagaacactgaagtattttgcttcatgttcttcttattctgctactttaccatcttgtcttggaatctcctgatccttttctcaattagggggcagttctctgttcaaccaaccctatgtactatttcctcagtcatttagcatctatggacatctgctatacctcctgtgtgacacccaaattgattgggggatctgcttgccgannnnnnnnnnnnnnnnnnnnctccactacatggtcatcatgagcagaaacagatgccatgtttttatctgggcttcctgggttggtggtgttgcccactcctttccccaggttatgatgctagtctgtttgcccttctgtggacccaatgaaatagaccactacttctgtgatgttttccctttgctgaaaattgcttgcactgatacctacatcattggtgtcctcatggttgccaattcaggaatggttgcctctgttatctttgttctcttgtttggttcatatgtagttatactgttcacattaaggaattactcagcagaagggagacgcaaagctctttcaacctgtgggtcccacatctctgtggttattttattctttggatctaccatctttgcctaccttagacctcctaccactttccctgaagacaaaatctttgcactgttttacactatcattgctcctatgttcaaccccctcatatatactctaagaaataaagagatgaagactgccataaagaaggtttggtgtcagatgtcattt

SEQ ID NO: 971 - DNA, 925 bp, Mus musculus
  variation (175)...(413): Any nucleotide A, C, G or T
  MOR225-9P
atggaatgcaagaggaacgtatcagaatttcttcttatggggctatcttccaagcagaacactgaagtattttgcttcattttcttcttattctgctactttaccatcttgtcttggaatctgctgatccttttctcaattagatgcagttcttctgttcaaccaacctatgtannnnnnnnnnnnnnnnnnnnnnnnnnnnnnnnnnnnnnnnnnnnnnnnnnnnnnnnnnnnnnnnnnnnnnnnnnnnnnnnnnnnnnnnnnnnnnnnnnnnnnnnnnnnnnnnnnnnnnnnnnnnnnnnnnnnnnnnnnnnnnnnnnnnnnnnnnnnnnnnnnnnnnnnnnnnnnnnnnnnnnnnnnnnnnnnnnnnnnnnnnnnnnnnnnnnnnnnnnnnnnnnnnnnnnnnnnnnnnntttttatctgggcttcctgggttggtggtgttgcccactcctttccccaggttatgatgctagtctgtttgcccttctgtggacccaatgaaatagaccactactactgtgacgttttccctttgctgaaagttgcttgcactgatacctacatcattggtgtcctcatggttgccaattcgggaatggttgcctttgttatctttgttctcttgtttggttcatatgtagttatactgttcacattaaggaattactcagcagaagggagacgcaaagctctttcaacctgtgggtcccatatatctgtggttattttattctttggaccttccatctttgtctaccttagacctcctaccactttccctgaagacaaaatctttgcactgttttacactatcattgctcctatgttcaaccccctcatatatactttaagaaatacagagatgaagagtgccataaagaaggtttggtgtcaggtgacatttttaggagaaaaacacaat

SEQ ID NO: 972 - DNA, 354 bp, Mus musculus
  MOR230-9
ggtattgttgtgacagccaacagtggcaccattgcattgggaagttttgtcatcttgctgatctcatacacagtcattctcatgtctctgagaaagcagtcatctgaaggcagacgcaaagctctctccacttgtggatcccacattgctgttgtcatcattttttttggcccctgtacttttatgtatatgcggcctgacactaccttctctgaggacaagatggtagctatattttacactattatcactcccatgctgaatcctctaatttacactctaagaaatgcagaagtaaagaatgcaatgagaaaactgtgggctagaaagttttcctgggaaactactgggaaa

SEQ ID NO: 973 - DNA, 367 bp, Mus musculus
  MOR230-10P
atgcataacaacagtatgactgaatttattttgttgggattgactcaggatccagaacaacagaaggcaatatttggagtcttcttgattctttaccttatgactttaatagggaactttctcatcatggtgaccattaagatgagtcagacacttgggagtcccatgtacgttttcctcttctatttgtctttcgctgatgcttgcttctctacaactacagcacctagattgattgtgaatgccctctcacagaaaaaaattatttcctacaatgaaatgtatgactcaggtctttgcagctcacttctttgggtgcatggagatcttcgtgcttatcctcatggccattgaccgctatgtagca

SEQ ID NO: 974 - DNA, 927 bp, Mus musculus
  MOR146-6P
atggaaccatataatttaacaggaaccttagaattcattctccttggactctcagaagaccctgaactgcagctcatcttatttgcactattcatgctcatatacctgctcactgtgcttggaaatgttctcatcatcttggccatcagctgtgattcccacctccacagcccaatgtacttcttcttctacaacctttcattgtctgacatgggcttcagcagcaccaccatccccaaaatgctgataaacttgcatgtccataacagatccataacatatgctgaatgcctaactcgggtatatttcttttttctttttgggggtatggacagcctattgctggcttgtgatggcctatgaccgatgggtagctatttgtcgccctctacactaccaagtcattctaagccctcgcctctgtagatgtttggtcatagtttccctttccattagtcttgtgagttcacaggtacactgcttgttggtgtcacaactaacattttgtattaacgtagaaatccctcatttcttttgtgatgttccagaacttgtaaaacttgcttgttctaacactactatcaatgacatagtcatgtttcttttaagcatcattgttggtttccttcctgcctcaggaatattttactcctactataaaattacttcttctatttttagagtaccatcactgttagcaaaatataaagccttctctacctgtggatctcacctgtcagttgtttgcctattttatggaacaggtataggagtttacctcagttcaacagtttctagttcttccagggaaagtatggtcgcttcggtaatgtatacaatggtggttcccatgatgaacccttcatttacagcctgaggaacagggacatcaagaaatccctctggaaaattgtccatcagataaca

SEQ ID NO: 975 - DNA, 1581 bp, Mus musculus
  variation (594)...(613): Any nucleotide A, C, G or T
  MOR0-7P
atgaatgatacattcattgtaactatgtttgcttatttccaggtaaagactgcaaattttatggagcaagaaaacatcacagctacttcaatattcatccttctgggactttcaaaagaaactgatatccagcctcttgtatttgggctgttccttttcatttacctggtctgcatcacaggaaatatgcttatcatcctgatcattacctctgatgcccacctccagactccaatgtatttctttctttctaacctatcttttacagacatttgcttcatatccaccacagtccccaagatgttagtgaacatccagacacagaataaatccataacatatgaaggctgccttgctcagatgtattttttcatgtttttttctggattggatagtttgttactgactgtaatggcgtatgaccggtttgtggccatatgtcaccccttgcactacatgattgtcatgagccctcacttgtgtgttagtctacttctactgtcttgcctaatctgcctggcctattcattgttgcaaactttattttttttttccattttttattaggtatttaactcatttacatttccaatnnnnnnnnnnnnnnnnnnnngggcatataaagtttgcaagtccaatgggcctctctttccagtgatggccgactaggccatcttttgatatatatgcagctagagtcaagagctccggggtactggttagctcataatgttgttccacctatagggttgcagatccctttagctccttggctactttctctagctcctccattgggagccctatgatccatccattagctgactgtgagcatccacttctgtgtttgctgggccccggcatagtctcacaagagacagctacatctgcgtcctttcaataaaatcttgctagtgtatgcaatggtgtcagcgtttggatgctgattatggggtggatccctggctatggcagtctctacatggtccatcctttcatctcagctccaaactccgtctctgtaactccttccatgggtgttttgttcccaaatctaaggaggggcatagtgtccacacttcagtcttcattctccttgagtttcatgtgttgcaaactttaatgtttttgagggtgtctttctgtaagaaaacagaaataccccactacttctgtgaacttgctcagattctcaagcttgcctgctcagacacatatgccaatgatatcctgctttactgtgtaactggtttactaggtattattcctctgtctgggattcttttttcatattctaaaattatcaactctatagtgggcatttcatctgctaggggtaagtataaagccttttctacttgtggctctcatctttcagtggtctcattgttctatggcacaggccttggggtctaccttacttctcaaatgtcctataaatccagagagggttcaatagcctcggtgatgtatactgtggttactcctatgctaaaccctttcatctacagcctgaggaacaaggacttgaatcaggctcttagaagattttttcacagcacaggagacaggtttcggtag

SEQ ID NO: 976 - DNA, 327 bp, Mus musculus
  MOR146-7P
atggaaccatataatttaacaggaaccttggaattcattctccttggactctcagaggaccctgaactgcagctcatcttatttgcactattcctgctcatatacctgctcactatgcttggaaatgttctcatcatcttggccatcagctgtgattcccacctccacagcccaatgtacttcttcctctacaacctttcattgtctgacatgggctttagcagcaccacaatccccaaaatgctgataaacttgcatgcacataagagatccacaacatatgctgaatgcctaactcaggtatctttctttattctttttgggtgt

SEQ ID NO: 977 - DNA, 934 bp, Mus musculus
  MOR131-2P
gtgagcagcaccaatcaatatagtgtctctgagttcatcctcctggaactctccaggcagccccagcagcagcagctcctcttcctgttcttcctcatcatgtacctggccactgtcttgggaaacctgctcatcatcctggccatcagcacagactcccgcctgcacacccccatgtacttcttcctcagcaacctgtcctttgtggatgtatgcttctcctccaccattgtccctaaggtactggccattcacatactcagaaatcaagccattttgtactctgggtgccttacacagctgtattttctctgtgtgtttgctgacgtggacaatttcctgctggctgtgatggcctatgaccgatttgtggccatatgccaccctttacactacacaacaaagatgacccatcagctgtgtgcccttcttgttgtggggtcaggggtggtagccaaccttaattgtctgttgcacacactgctcatggcttgactctccttctgtgagaactacatcatcccccacttcttctgtgatgcgactcctctcctgaaaatcttctgctcagatccacatctcaatgatctgatgattcatacagaaggaactatgatcattgttaccccatttgtctgcatcctgatctcctacatacacatcacctatgcaatcctgagagtctcatcccataggggaggatggaaagccttctccaggtggctcacacctggctgttgtgtgcttcttctatggcaccatcatcactgagtattttaacccttcgtcctctcactcagccaggagggacatgacagctgccatgatgtacacagtggtgacccccatgctgaaccctttcatctacagcctggggagcagggtcatgaaaaggggctttaagaaaagtgcttaccatgaaatttatatctaa

SEQ ID NO: 978 - DNA, 928 bp, Mus musculus
  MOR252-3P
atggctccagtaaaccagtcagttgtgaccatgttcatcctgcaaaggtttgttgatgaccccagggtccaggatgttctcttctgcctcttctttgccttgttcgtggcagccatagctggcaatggcctgatcatcgcgaccattcacagcagtcccaacctccacactcccatgtacttcttcctagtcaaccttggccctgatggatgtgatctgcactgtgactgtcttgcctaaagttctgcagagcctggtggcagagaacagcatatcttatgggggatgcctcacacagatgttcgtcttctcctgggtcctgggctctgagcttctgcttttctctgccatggcctatgaccgctaccttgcaatctgtcggccactgcactatggcaccctcatgagtggcagggtctgtgtggcccttgcaacctttgtgtggttcactggagctttcaattcattggtgctcacttgtctgatgttgccattgtctttctgtggtcccaatctcatcacacacttcttctgtgagatcccttctgtgttgatactgtcctgtagtcccacctttatcaatgacatcatgactgtcattgcagacatgttcctgacaggcctgaactttttattgacaatgacatcctatggcttcatcatttccagcatcctgcgcatccgctcagctgagggcaagaagcgtgccttctctacctgctctgcccacctggttgtggtcacactttattattccacagttctttatacttatgtccggccagccctaggaactgctgggttcctggacaaactcattgctgttctgtataccactgtgaccccatctctgaacccccttatctatactctgagaaacaaggaattcaaaacatcctttaaaaaactcatttccctcttgagaact

SEQ ID NO: 979 - DNA, 568 bp, Mus musculus
  MOR103-14P
ccgtttcgctacccagtcatcatgagccccggtctctgcagccttcctggctggaggctcctggttgtctggcttcaccatttccctggggaaggtcttcttcatttctcgtctaggctactgtggccccaacgtcatgaaccacttcttctgtgatgtgtccccactactcaaccttgcctgctctgacatgtcagttgcagagcttgtagacttcctcctggcgctgctcatcttgttggggccactgctgttgactgtcttctcctacacggccattctcagcaccgtgctacgcatgccctccgccggtggcaggcagaaggccttctccacctgcgcctcacacctggccgtggtggtcatcttctattcagcttctctcttcatctatgcccggccccgtgccctctactccttcgactacaacaagcttgtgtctgttgtctacacagtgctcacacccctaattaaccccatcatctactgccttcggaaccaagaggtcaagcaagcgctacataaggtacagcagcgagcagcccaggttctaggcgcctcctcctag

SEQ ID NO: 980 - DNA, 943 bp, Mus musculus
  MOR204-27P
atggctttccaggcggatggaaaccacactacagtaacagagttccttttgttaggcttaacagatgatccagtgcttagagtcatcctcttcaccatcatcctgtgcatctacctggtaactgtgtctgggaacctcagcaccatccttctcatcagagtctcttcccagctccatcaccccatgtactttttttctcagccacttggcttctgtagacataggcatttcatcttctgttacacccaatatgcttgttaacttcctggtggagagaaataccatctcctaccttggatggggcatacagctcagctttggtgatatctttgggtcagttgaatgttttcttttggctaccatggcttatgatcgcttcatggcaatctgcaacccactgctttattccaccaaaatgtccacacaagtctgtgtccagttggttgtgggatcttatataggaggtcttcttaatgcttcctttgctatggtttcctttttttcttttttattctgtggctcaaatagagttgaacattttttctgtgattttgttcctttagctgagctgtcctgttctgatatcagtatctccgtagttcttgtttcattttctgctggctcagttactatgctaacagtgtttatcatagtcatctcctattcttacatcctcatcaccatcctaaagatgcgttccacggaggggcgacagaaggccttctccacatgaacctcccatctcacagcagtcactctgttctatgggacaatcacatttatttatgtgatgcccaagtccagcttctctactaaccagaacaaggtggtgtctgtgttctacatggtagtcatccccatgttgaatcccctcatctacagcctcagaaataatgagattaaggatgctctgaggagacatcttggtaagaaaacactttct

SEQ ID NO: 981 - DNA, 928 bp, Mus musculus
  MOR204-28P
ttggctttcctagaggatgggaaccacactatagtgacagagttcactttactggacttaacagaagacctagtccttagagtcatcctcttcagcatcatcctgtgcatctaccttgtgtctgtgtctggcaacctcagcaccattcttctcatcacacgctctatcacaccatgtacttttttctcagccacttggctctgttgacatgggcctttcatcttctgtcacacccaatatgtttgtcaacttcctgactgagagacataccatctcctactttggatgtggcatccagctcagctcagctgctttctttggggcagttgaattcttccttctggctgtcatgacttatgattgcttgatagcgatctgaaacccactgctttattccaccaaattgtccacacaagtctgtatctagttggttgtaggatcttatgtaggcggtttccttaacgcttcatttgtgcccatttctttctttcttttcttttctatggacctaatagagtcaatcactttttctgtgattttcatcctatgatggaactctcctgttctgatgtgagtgtctctggaattgttatctcatttactgctggcttaatctctatgaccacattgattgttatagtcatatcttatttctattccctcatcaccatcctgaagatgcaatccactgagggtcaccaaaaaaccttctccacctgcgccgcccacctcactgcagtcattctctcttatggaacagccacattcttttatgtgatgccaaagtccacctactctgaggaccagaacaaggtggtgtcagttctacacagtagcaatccccgtgtggaatcccctcatctacagcccttggaatactgagactaagaatgccctgaaatgacaattttataggaaaacattgtta

SEQ ID NO: 982 - DNA, 936 bp, Mus musculus
  MOR256-38
atggtcaaccagagctcccctgtggtcttcttcctgctgggcttctttgaacacccacaactggaaaaggttctgtttgtggttgtcttgtgctcctacctcctcaccctcctaggaaacacactcatcctcttgctgtccaccctggatcccaggctccacactccaatgtacttcttcctctctaacctctccttcttggacctctgcttcaccacaacctgtgtcccccagatgctgttcaacctctggggccccgaaaagaccatcagcttcctgggatgctttgtctagctcttcatcttcatgtccctgggtacaacagagtgcatcctcctgactgtaatggcctttgaccgctatgtggctgtgtgccagcccctgcactatgccacagtcatcaacccccgcctatgtcagcagttggcaggtatagcttgggctataggtttggtccaatccatagttcagacacctcccaccctcaaactgccattttgttcccacaggcagatagacaactttgtgtgtgaagtcccatctctaattcaactctcttgtggagacatcacatataatgagatccagatggctgttgctagtatcttcattgtggttgtgcctctgagtctcatccttgtctcttatggtgccattgccagggcagtgctgaagataagctctgcaaaggggcgcaggaaagcttttgggacctgttcctcccacctcattgtggtcactctcttctacagctcagtcattgcagtttatctgcagcccaaaaacccttatgcccgagagaggggcaagttctttggtctcttttatgcagtgggtacccccacactcaaccctcttgtatataccctgaggaacaaggaggtaaaaagagcattctggaagctgctaaggaaagatgaggactctgaggagagc

SEQ ID NO: 983 - DNA, 826 bp, Mus musculus
  MOR256-39P
ggaacacacttcatcctcctgctgtccaccctggaccccaggctccactctccaatgtacttcttcctctctaacctctccttcttggacctctgcttcaccacaacctgtgttccccagatgttgttcaacctctggggccccacaaagaccatcagcttcctgggatgctctgtccagctcttcatcttcatgctcctggggacaacagagtgcatcctgttgacagtaatggcctttgaccgctatgtggctgtctgtcagcccctgcactatgccaccataatccacccccgcctatgtcgccagttggcaggtgtggcctgggctataggtttgatccaatccatagttcaaataccacccaccctcacactgcccttctgttcccataggcagatagatgactttctgtgtgaagtcccatctctaatccgactctcttgtggggacaccacttttaatgagattcagttgtcagttgcaggtgtcatcttcctgcttgtacctctgagcctcatcattgtctcttatggtgtcattgccagggctgtactaaaaactaactcttcaaaagggcgcagaaaagcttttgggacctgttcatcccacctcattgtggttaccctcttttacagctcagtcattgctgtctatctgcagcccaaaaatccctatgcccaagagaggagcaagttctttggtctcttttatgcagtgggcaccccccacactcaaccctcttgtatataccctgaggaacaaggaggtaaagagggcattctggaggctgctggggaaggatgcggcttctggaggaaactaa

SEQ ID NO: 984 - DNA, 792 bp, Mus musculus
  MOR121-2P
acaatatggatactcccttttcccctctatctttctttctcttctatctagtatttcaggattagaagtcttaagggtgtagaaaggcagtagaaaaagaaacccataaagtagccaaaagtctggctacactggctggctgcttgctccagttcctcaccttcacctctctagatgcagatgagtatttcctgctgactctcatggcacatgatcactgcctagcaatcttttactccctataatacccacgtctcatgaggcctcaatggtgcctggggttggtgattatagtctggctgtctggctttatggaagctggattagtggttgctttgacagcccagctgaggttctgtggccccaacctaattgatcacttttactgtgatttctcacctttgatgatcctggcttgctcagatacctgagtggcccagatgactacatttgttctctttgttgtcttcttacctgttctctctgggctgattctgatgtcctatgctcagtttgtggtgattgtgctgagaattccctctggggccagaaggaccaaggccttcttcacatgctcttctcacctggctatgatgttcacattctatggatcactcatggtgtggtacactgcgccctctgctgtccttagtttgcacactcctctccaaggtcattgctctgctctacacagtgtttgcccccattttcaattctgtcatctacaccttgaggaacctggacatgcagaaagcactaagaaggcttctttactgcaaatcaactgaaatg

SEQ ID NO: 985 - DNA, 760 bp, Mus musculus
  MOR121-3P
gacactcctctcccccccctccatctttctttctgtcctatctagtgttacagggttggaaggcatgagagtatagaaaggcagtagaaaaaggaacccataaagtggccaaaagtctggttacattgcctggctgcttgctccagttcttcacctttagctctctttatatagatgagtatttcctgctggctctcatggcatatgatcactgcctagcaatctgttactccctataatacccacgtctcatgaggcctcaatggtgcctggggttggtgctcacagtctgggtgtctggctttatggaagatggattagttgttgctctgacagcccagctgaggttctgtggccccaacctaattgatcacttttactgtgatttctcacctttgatggcttgcttcgatacctgagtggcccagatgactacatttgttctctctgttatcttcttgactgtcccatttggctggttctgatctcctatgctcagattgtggtgacagtgctgagaattctctctggggccagaaggaccaaggccttcttcatatgcccctctcacctggctgtggtgtccacactctatggaacactcatgggcttgtacactgtgccttttgttgttcattctcagctcctcaccaaggtcattgccctgctctacacagtgttcactcccgtcttcaaccctgtcatctacaccttgaaaaaccaggaggtgcagcaggcactaagaaggcttctctactgt

SEQ ID NO: 986 - DNA, 919 bp, Mus musculus
  MOR121-4P
atcattggttttccaatgcagggtggtcagccctgaaactatatatatatacacaaacaacaaaaatggacacagcagattgtatatatatatgtgtgtgtgtgtgtgtgtgtgtgtgtgtgtgtgtgtgtataagcatatgtacatacttacacatataaatacatatgtgtgtacaagtggttatcaagttgaaagtcaagtagggacctggaaggaggttggaaaatgtcagtagaaaaaagaactcaaagtaggcaaaagtctggctatactggccaactgcttcctccagtccttcatccttggctctgtagatagaaatatttcctactgattgtgatggtgtatgatcactacctcacaatctgtcaccacctatgatacccatttttgatggggcccctatggggcctagggtttggactcacagactagcttcgtggtagatgaattaattgttgctctgatggctcagctgaggttctgtgttcctaaacaaattgatcacttttactatgatttctcacctttggtggtcctggcttacacagatactggactggtccaggtgactacttttgttctctttgttgtcttcctgactgttccctttgggctggttctgatctcctgtgctcagattgcagtgactgtgttgagagttccttctaggaccagaaggaacaaggccttctccacatgctcctctcacctggatgaggtatccacattctatggatcacttatggtctggtacactgagccctctgctgtccattcccagatcctctccaaggtcattgccctgctctacacagtggtcacaaccatcttcgaccctggcatctacaccttgaggaaccaggaggtgcagcagtcactaagaaggcacctctactgcaaaccaactgaaatg

SEQ ID NO: 987 - DNA, 881 bp, Mus musculus
  variation (204)...(333): Any nucleotide A, C, G or T
  MOR171-32P
atggaggacatggcagcaggaaaccactgcacagtgactgagttcttcttagctgggctctcagagaagtcagaactccagctgccactcttcctgctcttcacaggaatctatctgatcaccatggcagggaacctgggcatgatcacactgattgggctcagttctcatctgcacacacccatgtactatttcctcagcagnnnnnnnnnnnnnnnnnnnnnnnnnnnnnnnnnnnnnnnnnnnnnnnnnnnnnnnnnnnnnnnnnnnnnnnnnnnnnnnnnnnnnnnnnnnnnnnnnnnnnnnnnnnnnnnnnnnnnnnnnnnnnnnnnncttgctttacaatgtaaccatgtcctatcagtatttacagttctctgatttcaggggtatatatttttgctgtgatctgttcatcctttaacactggcttcatgcttaggactcagttctgcaatttagatgtgattaaccactatttctgtgatcttcttcccctcttgaatcttgcatcctctaatacctacatcaatgaaatattgattctattttttgctacactgaattcatttgtcccagtgctgaccattattacttcctacatcttcattattgtcaccatcctctccattcactccagggagggcaagttcaaagcttttagtacttgtagtacccacatctctgctgttgctatcttctatggttcaggtgcattcacgtatttacagccctcatcactgaattctatgggccaagcaaaagtgtcctctgtgttttatactactgttgtacccatgctgaaccccttgatctacagcctgaggaataaggatgtcagtattgcactgaaaaaaatacttgaaagaaaaaaattcatg

SEQ ID NO: 988 - DNA, 534 bp, Mus musculus
  MOR171-33P
atggaggacatgacagcaggaaaccattgcacagtgactgtgttcttcttagctgggctctcagagcagtcagaactccagctgcccctgttcctcttcttcacaggaatatatctaatcactgtgtctgggaatctgggcatgattatactaattgggctcagttccaacctgcacacacccatgtactatttcctcagcagtttgtccttcattgactttggtcagtccacagttgttacccctaaaatgttggtgagctttctgacagagaagaacttcatcacctaccctggatgcatgactcagctctattttgtcatcatttttggcactgcagagagctacacattagctgcaatggcatatgaccactatgttgccatctgtaacaccttggtttacaatatagccatgtcctctcagatttactgttctctgatttcaggggtatacatttttgctgtgttctgtgcatcagtaaacatgggcttcatgtttaggatccagttctgcaaatcagatgtaatcaac

SEQ ID NO: 989 - DNA, 534 bp, Mus musculus
  MOR171-34
tcctatcaagtctgtttgttgatggtagctgtggtgtatggtattggcttaatcagtgccacagctcacacagtcttcctgctaagattgtttttctgtaaggctgataaaataaaccactacttttgtgatcttttcccattacttgagctgtcttgctctagtacttttatcaatgaaatattagcactgtccttcagtgcatttaatattattgtaccagccatgaccatcattggctcttacatcttcatcattatcagcattttgcacattaaatcctctgggggcagagtcaaggcctttagaacctgcagctcccatatcttggctgttgctattttctttggttctacaacattcatgtatctacaaccatcttcagtcagctccatggaccaagggaaagtgtcatctgtgttttataccattgttgtgcctatgttgaatcccatgatctacagcctgagaaataaagatgtcaaagttgccctaaaaaagttactacaaaagatgtttcctcaaaacaaggaa

SEQ ID NO: 990 - DNA, 552 bp, Mus musculus
  MOR275-5
gtgtgcctcctgctgatgtctgtatgttggatcctgggatccttggatggcttcatgctcacccctatcaccatgactttcccattctgtggatctcgggagatccatcacttcttctgtgaggtccctgctgtgacaaagctctcctgctcagacacctggctctatgagaccctcatgtatgtgtgctgtgtgctcatgcttctcatccctgtgacagtcatttcaggctcctatacatccatcctcctcactgttctcaggatgaactcagcagagggcaggaagaaggcccttgccacctgctcctcccacatgactgtggtcaccctcttctatggcgctgctgtctatacctacattttccctgcctccctccacacccctgagaaggacatggtggtgtctgtgttttacaccatactcacccctctgttgaacccactgatctatagttttaggaataagaatgtcacagaggctatgaagaaactgttgggtgtgaaacccttctttcaagaatctttaaaggaagtcatttataaagaatag

SEQ ID NO: 991 - DNA, 919 bp, Mus musculus
  MOR285-4
atggagacaggaaaccgcagctgtgggacagacttcagcttggttggccttttccagtatggacacatggacaccttcctcttcacagtcatctccatcctctttgcagtggctctcataggcaacatcacactggtcctcctcatcaggctggaccaaagactccacacccccatgtactttctcctcagccagctctccatcatcgacatgatgtacatctccaccactgtacccaagatggcagctaacttcctctcagacaccaaggccatttcctttctgggctgtgctgtccaagcctttgtgtttctgaccctgggtgggtctgaagccctcctgctgggcttcatgtcctatgacaggtatatagccatctgccaacccttgcactaccctgtgctcatgagtaggaaagatctgctgctccatggtcgccggtgcctggagcagcagctccatcaatgcattcatacacacagtgtatgtgtttcaacttccattctgtggatctaggatggttaaccactttttctgtgaggttccatctctcctgccactggtgtgtgaagacacgtcccagtatgagtatacagtcctcgtgagtggacttgtcattctgctgctccccttcctggccatcctagcttcctatgctcgggtcttggttgttgtactccagatgggctcagggaagggacagagtagagctgtgtccacctgctcctcacacctgactgtggccagtctgttctatgttactggactctccacatatacccagccacactccttgcattctcctggaagggacaaagtggtggctgtgctctactcaatcgtcacccctgttctgaacccattcatctacagcctgaggaacaaggaggtcatgggggcgctgaggagacaaatgggg

SEQ ID NO: 992 - DNA, 777 bp, Mus musculus
  variation (212)...(249): Any nucleotide A, C, G or T
  MOR275-6P
atggacctcaccacctggatgaacaactatactggacagtcagatttcaccctggtgggactcttcagtcaatccaaacaccctgccctgcttgctgtggtcatatttgtggttttcctgatggccttgtctgggaacgccctcctgatcctgctgatactctctgacacccaccttcacacaccaatgtattttttatcagccagctgtcnnnnnnnnnnnnnnnnnnnnnnnnnnnnnnnnnnnnnngtttgtctcctgctgatgtctgtgtgttgggtcctgggatcccttgggatggcttcatgctcacccctgtcaccatgaccttccccattctgtgggtcccgggagatccatcacttcttctgtgaggttcctgctgtgacaaagctctcctgctcagacacctggctctatgagaccctcatgtatgtgtgctgtgtgctcatgcttctcatccctgtgacagtcatttcaggctcctatacatccatcctcctcactgttctcaggatgaactcagcagagggcaggaagaaggcccttgccacctgctcctcccacatgactgtggttaccctcttctatggcgctgctgtctatacctacatgctccctgcctctctccacacccctgagaaggacatggtggtgtctgtgttttacaccatactcacccctcttttgaacccactaatctatagtcttaggaataagaatgtcacagaagctatgaagaaactgttgggtgaaaacccctctttccagaaacag

SEQ ID NO: 993 - DNA, 923 bp, Mus musculus
  MOR284-1P
tgggacctcagcagtcccattctcctgggacttttcccagagctgtgccatctgggcatccttgtcatttctattctcctgatttatctcattgcattcacagggaatgccatcctggtcctcttgatctgggcagactctcacctccgcaccccaatgtacatactactcagtcagctctcttctctcttatcgacttggccttaatttccgccactgccccgaagatggtcatcaactttttctccagaaagaaaagcatctccaaagttgcctgtgggacccagattttctgcttctttgcccttggtggtcgtgagtgtctccttctgaccctcatggcttacaaccactatgtggctgtctgtcatcccttgagatattcaattatcatgaacaatagagtctgtctgtggatggccctcatgtcctggggtggaggtgccctgaattctctcatcaacaccttctacatcatgcacttcccattctgtggctctagggaaatccaccacttcttctgtgagctgtccactgtcctgaggctctcttgtgaggaaaacttctttgtatgagatggtggtgtctgtcaattgcatcgtgtttgttcttctcctcttgggactcatcacgtcctcctatctgctcatcttcctcgatgttctccgaataaattctccagagggcaggaggaaagccctggccacgttttcctcccacctggccgttgtgagcctctactatgggcctgcatgatcatttacatgacccctaccactttccacactccagaacagaatgaaatactcgctatgattaacaccatctttacccctatgctcaaccctctcatctacagcctgaggaacaaggaggtgcatgctgccctgagaaaagtaatgagtcaacgattcattttaaag

SEQ ID NO: 994 - DNA, 357 bp, Mus musculus
  MOR275-7P
atgagcaactacactacacagtcagatctcaccctagcgggactcttcagccgatccaaacaccccgttctgcttgctgtggtcatatttgtggttttcctgatggccttgtctgggaacgccctcctgatcctgctgatactctctgacacccacctccacacacccatgtacttttttatcagccagctgtccctcatggacatgaggtacatttctgtcactgtgcccaagatgctcatggaccaggtcctggggagccacaagatctcacctgctgcctgtgggatgcagatgttcctgtacctgacattagcagggtcagaatttttccctctggctgccatgtcttatgaa

SEQ ID NO: 995 - DNA, 833 bp, Mus musculus
  MOR204-29P
tacctggtgactgtgtttggaaatctcagcaccatccttctcattgggagtttcttccaaactccatcatcccatgtacttttttctcagccacttggcttctgttgatatgggcctttcatcttctgtcacacccaatatgcttgtcaacttcctgactgaggaaaaacaccatctcctaccttggatgtggcatacagctcagctcagctgctttctttggggctgttgagttcttccttctggctgccatggcttatgatcgcttggtagcaatctgcaacccactgctttattccaccaaaatgtccacacaagtgtgtatccagttggttgtaggtacttatgtagggggtttccttaacgcttcatttgtaacccatttctttttttcttttctcttctgtggcccaaatagggtcaatcactttttctgtgatttatctcctatgatggaactctcctgttctgatgtgagtatctcagaaattgttatctcattttctgcaggctcattcacaatgaccacattgtttgttatagtcatatcttatttctatattgtcatcaccatcctgaagatgcactccactgagggtcgccaaaaagccttctccacctgcatgtcccacctcactgcagtcactctctactatggaactaccatattcatttatgtgatgcccaagtccatctactccagggaccagaacaaagtggtgtctctgttctacgtggtggtaatccccgtgttgaatcctctcatctacagccttcggaataatgagattaaggatgctctgaaaagacagttttataggaaaacattgtta

SEQ ID NO: 996 - DNA, 624 bp, Mus musculus
  MOR204-30P
atgatatcctatggctttcctggacaatggaaccacactgcagtgacagagttcattttattgggattaacagatgacccagtcctcagagtcattctcttcagcatcatcctgtgcatctacctagtgactgtgtctgggaacctcagcacattccttctcatcagagtttcttcccagctccatcaccctatgtacttttttctcagccacttggcttctgttgacatgggcctttcatcttctgtcacacccaatatgcttgtcaacttcctgactgagagacatagcatctcctaccttggatgtggcatacagctcagctcagctgctttctttggggcagttgaattcttccttctggctgttatggcttatgatcgcttcatagcaatctgcaacccactgctttattccaccaaattgtccacacaagtgtgtatccagttggttgtaggatcttatgtagggggtttccttaatgcttcatttgtaacccatttctttttttcttttttcttctgtggaccaaatagagtcaattactttttctgtgattttcctcctatgatggaactctcctgttctgatgtgagtgtctctggaattgttatctcatttact

SEQ ID NO: 997 - DNA, 532 bp, Mus musculus
  MOR204-31P
atggctttcatatacaacggtagccagacaacagtgacagagttcatattattgggactaacagatgacccagtccttaaagtcattctcttcagcatcatcctgtgcatctacctggtgactgtgtttggaaatctcagcaccatccttctcattggagtttcttccaaactccatcatcccatgtacttttttctcagccacttggcttctgttgatatgggcctttcatcttctgtcacacccaatatgcttgtcaacttcctgactgagaaaaacaccatctcctaccttggatgtggcatacagctcagctcagctgctttctttggggctgttgagttcttccttctggctgccatggcttatgatcgcttggtagcaatctgcaacccactgctttattccaccaaaatgtccacacaagtgtgtatccagttggttgtaggtacttatgtagggggtttccttaacgcttcatttgtaacccatttcttttttctttctattctgtggcccaaatagggtcaat

SEQ ID NO: 998 - DNA, 563 bp, Mus musculus
  MOR246-1P
atggctcacaataatgaatccacggtatctgagtttgtgcttctgggactttctaaatcttggggacttcagcttgtgctttttaccatcttctttgtcatctatgtgacatcagtcttgggcaatatcatgattattgtcatcattttctctgactcacacttgaactctcctatgtactttttgctcagtaacctttcatttattgacatctgccaatctaactttgccacaccgaagatgcttgtggacttttttgtcgaatacaaaactatttcttttgagggttgtatggctcaaatatttcttcttcatagctttgttgggagtgaaatgatgttgcttgtagctatgggatatgacaggtttgtagcaatatgtaagccactgcactacaatctaattatgaatcggagagtatgtataatttttgtgtcaatttcttgggcagtaggtatccttcattctgtgagccatttggcatttacagtgaatctgccattctgtggtcccaatgaggtagatagcttcttttgtgatcttcccttgggataaagcttgcg

SEQ ID NO: 999 - DNA, 459 bp, Mus musculus
  MOR247-3P
gcattgacagtgaatttgcctttctgtggacacaatattataaataatatattttgcgaccttcccctggtaatcaagcttgcttgtattgaaacatacactctagagttgtttgtgattgctgacagtgggctgctctcctttatctctttcttcctcttgcttgtttcctatactgtcattctgctcattataaagcacaaatcacctggcagtctctccaaggcgctgtccacattgtctgctcacataattgtggtcactctgttctttggaccctgtatttttatctatgcctggccatttgggagttttgcaagcaatacaactcttgctgtattttacactgttatcacacctttactgaatcctattatttacacactgagaaatcaggaaatgaagaaagccatgagaaaattatggatccaacaagtcagctgcacatagagcttacag

SEQ ID NO: 1000 - DNA, 873 bp, Mus musculus
  variation (258)...(277): Any nucleotide A, C, G or T
  MOR256-40P
atggctgtaaccaatgaaagccacccaaaagaattcatcctactgggctttgctaaccatccttggctggaactccctctctttgttactcttctgataacatatcccatggctttgatggggaacatcgccatcattctggtgtccaccttagaccctcgtctctacagccccatgtactttttcctcaagaatctctcctttctgggacatgtgctacaccacaagccattgtgcctcagatgctgtttaacctgnnnnnnnnnnnnnnnnnnnnttttagctattatgtcctttgatcgatatgtggctatctgcaaacctctccactacactctcattatgaaccaaagagtatgcattttgtcagtatctattatgtggctgactggagtgatctttggtttttcagaggctacacttacattgcaactgccattatgtggcacaaataaattggatcatttattgtgtgaaatcccagttctcataaaaactgcctgtggtgaaaaggaatttaatgagctagcactttctgtggtatgcatttttatacttattgttcctctgtgcttaattcttgcttcttatgttaatattggatgtgcagtacttagaattaaatcttctgaaggaaggaggaaagcctttgggacatgttcttcccatctcattgtagtttccttattttatggtccaggtattagcatgtaccttcagccttcttcatctatcacaagggaccaacccaagttcatggctctgttttatgcggtgataactcctacattgaatcccttcatctataccctaagaaacaaggatgtaaagggtgcctttaaaaagctcctgagaagcattttcagttcaaag

SEQ ID NO: 1001 - DNA, 963 bp, Mus musculus
  variation (590)...(810): Any nucleotide A, C, G or T
  MOR182-7P
atggaggtgaacagaagccaggtgactgattttgttctcaaaggaataacagatcatacagagctgcaagtccctctgtttctcctgttcttcttcatttatgtcaccaccatggtgggcaaccttggtttaatctttctcatctggaaggatcctcatcttcacacacccatgtactatttccttggaagtttagcttttgctgatgcctgtacttcatcctcagtgactcccaggatgcttgttaatatcttagacaatggtaagatgatttccctctctgaatgcatggcccaatattatgtttttggatccagtgcaaccacagaatgtttcctcctggtagcgatggcctatgaccgctatgtagccatatgcaatcctttgctctatcttgtggtgatgtccaacagagtgtgtacttgcctgataagtggctcatatataatcggttttctgcatccacttattcatgtaggtttattatttagattaaccttctgtaaatccaatataatagatcatttttactgtgagatcctgccactctatacaatttcttgcaccgcacccatctattaatgcatttnnnnnnnnnnnnnnnnnnnnnnnnnnnnnnnnnnnnnnnnnnnnnnnnnnnnnnnnnnnnnnnnnnnnnnnnnnnnnnnnnnnnnnnnnnnnnnnnnnnnnnnnnnnnnnnnnnnnnnnnnnnnnnnnnnnnnnnnnnnnnnnnnnnnnnnnnnnnnnnnnnnnnnnnnnnnnnnnnnnnnnnnnnnnnnnnnnnnnnnnnnnnnnnnnnnnnnnnnnnnnttatgtacgtgagccctgggtctggaccaagtaaatataagaataagatgtattctctgttttacaccattgtgattcctctactaaaccccttcattttacagcttaagaaacaaggaagttttaggggctctgagaaaaatcataaagtca

SEQ ID NO: 1002 - DNA, 919 bp, Mus musculus
  MOR182-8
atgacagtagaaaaccagactgtggtggcagtgtttgttctcacaggactcactgagagacccgagttgcaggttcccctcttcctggttttcttcaccatctacctcatcaccatggtgggcaaccttgggctcattgctctcatctggaaggaccctcacctccacactcccatgtacttatttctgggaagcttagcttttgcagacgcctgtgcttcatcttctgtgactcccaagatgcttgtcaattttttatctaaggatcacagaacattcttggttgagtgcttcacccagttttatttctttggttccagtgcaacgacagaaatgtttcctactgtcagtgatggcctatgaccgctatgtggccatatgcaaccctttgctttatccagtgatgatgtccaatagcctctgtatgaaatttatacatgtttcatatattgtaggttttctacattcagcaattcatgtgggcttgttagtgagattaaatttctgcaagtccaacatcatacactatttctactgtgaaatcttgcagttattcaaaatttcctgcactgatcctacaatgaacgtccttctggttttaatattttcagctttgatacaaggcttgacttttatgactattatcgtctcctacttctctgtccttcttgccatcctgaaaacaaagtctgagaggggcagacgcaaagccttctccacctgcagtgctcacctgctctccgtgtctctgttctatggcacacttttcctcatgtatgtgcgtcccgggtctggatcaggtgaagataaggacagaatgtattctttattttacacaataataattccctttctaaatccttttatatacagtctgaggaacaaagaggtaacagctgctctgcgaagaaaaatgaaa

SEQ ID NO: 1003 - DNA, 709 bp, Mus musculus
  MOR183-5P
tcatccacagtgacaccaaagatgctacaagacattttttccaagagtaaactgatctctttctctgaatgcatgatacagttttttttcatttgtagtgagtacaaccacggaatgttttcttttggcagcaatggcctatgatcgctatgtagccatatgcaaacctttactctacccagtgatcatgacaaatagactttgtgtacgtcttttaacattgtcctttttaggtggattcattcatgctttaattcacgaaggctttttattcagattaattttctgtaggtctcacataataaaccacttttattgtgatgttatgccactgttaaagatttcctgtaatgacccttctatcaattacctgatgctctttattttctctggctcaattcaggtcttcacaattacaactatccttgtctcttatacacttgttctgttttctatcctaaagaagaaatctctcaaaagcataaagaaagccttttccacctgtggagcccatctcctctctgtttctttgtactatggccctctgctcttcatgtatgtgcgccctgcatctccacaagtaaatgatgaagatatgatggactctgtattttacaccatcataattcctgtactgaacccaattatctacagtctgaggaatgagcaagtaaaaaaatcactggcaaaatgtttaaggagaaatagt

SEQ ID NO: 1004 - DNA, 918 bp, Mus musculus
  MOR183-6P
gaaataaaaaattctactgtgctgacagagtttgtgcttacagggctcacagggtctccagagctacaggtgcccttattcttgtttttttttggtgatctatcttatcacaattgtagggaaccttggtctaattgctcttatctggaatgaccctcacttatatatccctatgtacttctttcttggccatctggcttttgtggatgcttgcctatcatccacagtggcaccaaagatgttactcgacttcttacagatgaataaaatgatttcctactctgaatgcatgacacaattctttatctttgcaatctgtgttactacagaatgtttcttgttgtcagctctggcatatgatcgctatgtagccatatgcaaacctttactttatccaatgattatgactaatagactatgtatatgtctcttagtcctgtctttcgtaggtggaattcttcaatacacgagggatttctattactactaacgttctgcaattccaatatagtacatcaatttttctgtgacaccgttccattgctaaagatttcctgtactgacactactcttaattttcaactgttatttgtttttgctggaataattcaagtcctcaccgttttgattgtttttgtgtcctatacactagtcctgtttatgattttgcaaaggaagtctgtccaaggcatgaagaaggctttctctacctgtggtgcccatctcttatctgtgtctctgtactatgggcctcttctcatcatgtacgtgttccccgtgtcccaagaagcagatggtcaagatatcatagactctctgttctacacgatcataattcctgtgttaaatccaattatctacagtctgagaaacaagcaagtcatagattctctgaaaaaagtgttaaagaaaaaggtt

SEQ ID NO: 1005 - DNA, 483 bp, Mus musculus
  MOR113-6P
tttttaggtggatttattcatgctttaattcatgaaagctttttattcagattaattttctgtagctctcacataatacaccacttttattgtgatgttataccactgttaaagatttcctgtaatgacccttctatcaattacctgatgctctttattttctctggctcaattcaggtcttcacaattacaactatccttgtctcttatacacttgttctgttttctatcctaaagaagaaatctctcaaaagcataaagaaagccttttccacctgtggagcccatctcctctctgtttctttgtactatggccctctgctcttcatgtatgtgcgccctgcatctccacaagtaaatgatgaagatatgatggactctgtattttacaccatcataattcctgtactgaatccaattatctacagtttgaggaataagcaagtaaaaaaatcactggcaaaatttttacggagaaatact

SEQ ID NO: 1006 - DNA, 425 bp, Mus musculus
  MOR184-10P
ttctgcaggtctcatgtgatcaagcacttcttttgtgatgtcctcccccctatacagactctcatgtgttgacccttattatcaatgaactgatgatactcatcgttgctggttcagttcaaactttttccattattatagtcctgatttcttatttctgcatcctttatactatattcacaatgaagtccagagagggaagaagcaaagccttatctacttgtgcatcccactttctgtctgtgtcaatattctatgggtctcttctctacacatatattcgaccaagttctatcaaaggaggagatgaagccatacctgttgctatattttatactctggtaattcctttattaaacccctttatttatagtctgagaaataaagaagtaattaatgtgattaaaaaaaccataaacaaagga

SEQ ID NO: 1007 - DNA, 400 bp, Mus musculus
  MOR113-7P
ttttattgtgatgttatgccactgttaaagtatttcctgtaatgacccttctatcaattacctgatgctctttattttctctggctcaattcaggtattcacaattacaactatccttgtctcttatacacttgttctgttttctatcctaaagcagaaatctctcaaaagcataaagaaagccttttccacctgtggagcccatctcctctctgtttctttgtactatggccctctgctcttcatgtatgtgcgccctgcatctccacaagtaaatgatgaagatatgatggactctgtattttacaccatcataattcctgtactgaacccaattatctatagtttgaggaataagcaagtaaaaaaatcactggcaaaatttttaaggagaaatact

SEQ ID NO: 1008 - DNA, 925 bp, Mus musculus
  MOR170-10P
atggaaaatgactcttttgtgtctgaatttatccttatgggactgacagatcatcctgaactccagttgtccctgtttgttctctttttgatgaactacacagccattgtgatgggaaacttgagcttaatgattctcattttcttgaattcaaaccttcacacccccatgtactttttcatcttcaatttgtccttcattgatttttgttattcattcgtctttacccccaagatgctaatgagctttttttttagagaaaaacaccatctacttcagaggatgcatgactcagctgttcttcttctgcttttttgtgaactctgagagttatgtgctgacagccatggcctacgattgctatgtggccatctgtaagcctttactatacaagactatcatggtacctaggatctgttgtcttctgatgtttgtttaatatttgatagggtttactagtgccatgatcctcacaggcttaatgtttaggctcaacttttgtaataaccacatcatcaatcactacatgtgtgacatcttccctgtcattcagatctcctgcagtgacacctatctcaatgagcttgttagtactgctgtggtaggtacaggtatcattttatgtagcctccttatcttaatgtcttatgctctgatccttttcaatatccttaatatgtcctcaggtaagggttggtctaaagccatgggcacttgtggctcccacatcataaccgttagtctcttttatggatctgggctccttgcttatgtcaagccatcatctgctgagactgtgggccagggaaaatttttctcactgttttatacatttctcgtgcccgtgctgaatcctttcatatacagtccccagaacaaagatgtcaaagttgctgtgaagaaaaccttgaagagaatctcaaat

SEQ ID NO: 1009 - DNA, 937 bp, Mus musculus
  MOR166-1
atggttctagacaatggttcttacatgactgaattcattttactggtattaaatgatcctgatctccagttacccctgttcctactctttctgctaatatacacaacaacaacattggggaatttggctttgatcactttaattgcattgaattctctccttcacagccccacatactgttcccctttaaacttgtctttaattgacctctgttattcatctgtaattacacccaaaatgctgatgaacttcttagtaaggaagaacattatctcctacatggaatgtttacctagctctcttttgtttgtttgtttgtttttctgcaatttgtgaatgttgtgttctgatatcaatggcctatgataattatatggccgtatgcaatccagtcttgtataacattactatatctcccaaggtgtgttcctatcttatgcttggttcacacattatgagattttctggtgccatgattcacactggaagtattctgagactgcccttctgtgacaggagtatcatcaaacactatttctgtgaacttttccctttgctgcaactttcctgtaccagcatttatgccaacgaaatagagattctaatcatagatagtaaagatatcattgtgtccagtgttatcatctttacctcttatggtttcattctctcaaatatccttcaaatgagatccactgcaggaatgtccaaagcctttagcacctgcatctcccatatacttactttttctttattctttggctcatgtgcattaatgtatcttcatccctcctcacctgggtctatggatcagggaaaagtctcttctgtcttttatattattgtggttcccatgatgaaccccttaatctttagctttagaaacaaggatattaaaattgcactgagaaaagtcttgagcaaaaagaggttttta

SEQ ID NO: 1010 - DNA, 934 bp, Mus musculus
  MOR162-8
atggcctctggcaatgactccaccacagtgaaggagtttattctgttgggcttgacacagcaaccagagctccagctgcctttcttcttcctgttcttgggaatctatgtggtctccattgtggggaacctgggcttgattgttctgattgttttgaatcctcacctgcacacccccatgtactactttctcttcaacctttccttcattgatttctgctactcctctgtcataacccccaaaatgctggtgggttttgtgaaacagaatatcatttctcatgctgagtgcatgactcaactctttttctttgccttctttgttattgatgaatgttgtattttgacagcaatgtcctatgacagtatatgtggccatatgtaagccattgctttataaggttaccatgtcctatcaggtctgcttcatgatgacagtgagtgtgtacatgatggggtttgtgggtgccatagcccacacaatttgcatgctgagactcaccttctgtgatggcaacatcattaatcactacatgtgtgacataccccctctcctgaagctctcctgcacaaacacctctgtcaatgagctggtggttttcattgttgtgggtgtcaatgtgataggacctacattgatcatctttacttcttatactttgatcattttcaacatttcacatatccgttccactgaaggcagatccaaggctattagtacctgtagctcgcacataatagctgtttctattttctttggagcctcagcattcatgtatcttaagccttctcctgttggatctgtgggtgaagataaagtatctacggttttctacaccattgtgggcccgatgttgaaccctttcatctacagtttgaggaacaaggatgtccacattgcactgcataagactttgaagaaaagcatgcttatc

SEQ ID NO: 1011 - DNA, 705 bp, Mus musculus
  MOR256-41P
atggatagtttcaatgccacgttagaagagagattctttttggtgggctttttagattggcctcagctggaactcatcctttttgtttttatttcaattttctactccctaactatctttggcaacaccgccatcatcgctctctcccaaatggaccttcgactgcacacccccatgtactacttcctctcccacctctccttcctggacctctgctacaccaccagcactgtgccacagcttctcataaatcttcatggacttgacaggaccatcagctatggagggtgtgtggcccagcttttcatatctcttgcactgggatccactgagtgtgtgctcttagtggtgatggcttttgaccgctatgctgctgtgtgtcgtccactgcactacatgaccatcatgcacccccttctctgtcaggcattggctcttgcttcatgggtaggaggattcttgaactctctgattcaaacaggcctcatgatggccatgccactctgtggacatcgactgaatcacttcttctgtgagatgcctgtcttcctcaagttggcctgccaggacacaggaggaacagaggccaagatgtttgtggccagagccataatcttggtcttccctgcaacattaattcttggctcctatggacacattgctaaagcagtactaaaggtcaagtcaacagctggacgcagaaaa

SEQ ID NO: 1012 - DNA, 934 bp, Mus musculus
  MOR233-15
atgcaaaaccagagcattgtcactgagttcatactgctgggactttcacagaacccaaaagtggagaaaatactatctgttttgtttttcttggtctaccttgcaactattggaggaaacatcataattgtggtaacaattgtattcagtcctgcactttctggctcccccatgtacttctttctatcttttctatccttcctggatgcatgtgtttcttccgtaatcacacccaagatgattgtagacttcttctatgagaggaagaccatttcctttgaatgttgtatgatacaactctttgctgtccacttcttcacaggggtggaagtgattgtcctgtcagccatggcctatgaccgctatgtagctatttgcaagcccttgcactactcttccatcatgacccagaggctctgtggcatcctagtcggaatagcttgggcaggaggcttcttgcattctatcatccaaattatcttcactttgcagttgcccttctgtggccccaatgttattgatcattttgtatgtgacttgttcccattactaaagcttgcctgcaccaatacacacatttttgtcattttggtatttgccaatagtggttctatctgcatcattatcttctctattttgcttgtttcctatggtgtcatcttgttctctctgagaaaccacagttctgaaggtcggcgtaaagctctctctacctgtggatcccacattactgggtgtgcttttgttctttgtcccttgcatattaatatatgcacgaaataattctgaattctcatttgagaaaaatgtgtttatatttgatgatgtcctgacaccaatgctaaatcctttggcttacactttcaggaataaggaaatgaagaatgccatcaagaaaatgtggaggagattgtttaatatttctgataagcat

SEQ ID NO: 1013 - DNA, 789 bp, Mus musculus
  MOR233-16P
atgaattcaatttacttcatattcttcttgaaattatgcaaaaccagagttttgtaacagaattcatattccttggactttcacagaaccctaaagtccagaaaatagtttttattgtatttttatttgtctacattgcaactgttgggggcaacatgataattgtggtgaccattgtctgtagcccagcattgatagactgccccatgtacttctttttggcattcttgtccctattggatgcatgcttctcttctgtcatcacaccaaagatggttgttgactccctgtatgagaagaaaactatctcctttgaaggatgtatgatgcagttatttgctgagcacttccttgcagcagtagaagtgattgtcttgacagccatggcctatgaccgctatgtagcaatttgcaagcccttgcactactcttccatcatgaactggaggctctgtggcacacttatggggatagcatggacagggggcttcttgcattctatcatacaaattatcttcacgttgcaattgcccttctgtggaccaaatgtcatcgatcatttcatgtgtgacttgttcccattactggaacttgcctgcactgatactcatatctttggccttttagtggttgccaacagtgggtctatctgcatcataatcttctctattttgctggtctcctatggtgtcatcctgttctctctgaaagatcacagttctgaagggcgatggaaagctctctccacatgtggatcccacattgcagttgtggttttgttcctttgtc

SEQ ID NO: 1014 - DNA, 1036 bp, Mus musculus
  variation (370)...(902): Any nucleotide A, C, G or T
  MOR225-10P
atgtggattcacctagaattcatggaaaatcataaaaatgtcacagagttcatttttatgggtctttgggagaatagacaaatagagctgctgttctttctcttgttcctgctttgctacctggctgtcttaatgggaaactccgtcatccttctcaccatcacctgcagccacctaatcgaacaaccaatgtattattttctctgccatctttccctcatggacctctgctacacctccactgtgattcccaggctcatcagggacttggcagcaacaagaaaaaacatttcctataatgagtgcatgacccagctcttcactgcccacttgctggcaggtgtggaaatcttcatcctggtgtccaggnnnnnnnnnnnnnnnnnnnnnnnnnnnnnnnnnnnnnnnnnnnnnnnnnnnnnnnnnnnnnnnnnnnnnnnnnnnnnnnnnnnnnnnnnnnnnnnnnnnnnnnnnnnnnnnnnnnnnnnnnnnnnnnnnnnnnnnnnnnnnnnnnnnnnnnnnnnnnnnnnnnnnnnnnnnnnnnnnnnnnnnnnnnnnnnnnnnnnnnnnnnnnnnnnnnnnnnnnnnnnnnnnnnnnnnnnnnnnnnnnnnnnnnnnnnnnnnnnnnnnnnnnnnnnnnnnnnnnnnnnnnnnnnnnnnnnnnnnnnnnnnnnnnnnnnnnnnnnnnnnnnnnnnnnnnnnnnnnnnnnnnnnnnnnnnnnnnnnnnnnnnnnnnnnnnnnnnnnnnnnnnnnnnnnnnnnnnnnnnnnnnnnnnnnnnnnnnnnnnnnnnnnnnnnnnnnnnnnnnnnnnnnnnnnnnnnnnnnnnnnnnnnnnnnnnnnnnnnnnnnnnnnnnnnnnnnnnnnnnnnnnnnnnnnnnnnnnnnnnnnnnnnnnnnnnnntgttttacactgtgattgccccaatgttgaatccccttatctatactctgagaaacagtgagatgaaaagtgccatgcacaaggtgtggtctcggctgtcactcagagttgaagtaagtgaaagaatattgtga

SEQ ID NO: 1015 - DNA, 471 bp, Mus musculus
  MOR233-17
tctatcatacaaattatcttcactttacagctacccttttgtggacccaatgtcattgatcattttatgtgtgacttgttcccattactggagttggcatgcactaacacttatgtctatggtctcttagtgtttgccaacagtgggtctatctgcatcataatcttttctatgttgctaatctcctatggtgtcatcttattctctctaagaagtcacagttctgaagggcgatggaaagctctctctacttgtggatcccacattgctgttgtggtttcattctttgtcccatgcatattcatatatgcacgatctacatctgcatcatcttttgagaaaaaggtggctgtgttcgatggcatcatgactccattgctcaatcctctaatttacactttcagaaataaagaaatgaaaaatgccattaggaaaatgtggaacagatttagaatggtctctgacaaattt

SEQ ID NO: 1016 - DNA, 933 bp, Mus musculus
  variation (460)...(678): Any nucleotide A, C, G or T
  MOR231-15P
atgggccagagcaacaatgtcacagaatttgtcctgctgggcttcactcaggatcctgctgggcaaaaagctttatttgttatgttttcactgatgtacattgcaacaatggtgggcaacctgctcatcgtaggaacagtgattgccagcccctccttgggctccccaatgtacttcttccttgcctctctgtcactcatggatgctgtttattccactgccatctcacccaagttgattgtagacttgctccgtgagaaaaagaccatctccttcagagcttgtataagccagctctttatagagcatttgtttggtggggttgacattgtcattctagttgcaatggcctatgatcgctatgtggccatctgtaagccactgcattatttgatcatcatgaatcgaagggtatgtatcctcttacttggtgatggcctgggcgggaggttttgcacannnnnnnnnnnnnnnnnnnnnnnnnnnnnnnnnnnnnnnnnnnnnnnnnnnnnnnnnnnnnnnnnnnnnnnnnnnnnnnnnnnnnnnnnnnnnnnnnnnnnnnnnnnnnnnnnnnnnnnnnnnnnnnnnnnnnnnnnnnnnnnnnnnnnnnnnnnnnnnnnnnnnnnnnnnnnnnnnnnnnnnnnnnnnnnnnnnnnnnnnnnnnnnnnnnnnnnnnnnctgtccacctgtggttcccatatcactgtggtttttctcttttttgttccatgtattttcatgtatgttagacctgtttctagttttcctattgataaatccatcactgtaatttataccattgtcactcccatgttgaatcctttaatatataccttgagaaattcagaaatgaaaatttccatggaaaagctcctgcagaaaacattaagtccatgtagaatacgtctttcttcttgctgcttatgttactaa

SEQ ID NO: 1017 - DNA, 358 bp, Mus musculus
  MOR231-16P
atgggccagagcaacaatgtcacagaatttgtcctgctgggcttcactcaggatcctgctgggcaaaaagctttatctgttatgttttcactgatctacattgtgacaatggtgggcaacctgctcatcgtagggacagtgattgccagcccctccttgggctccccaatgtacttcttccttgcctctctgtcactcatggatgctatttactccactgccatcacacccaagttgatagtagacttgctctgtgagaaaaagaccatctccttcagagcttgtataagccagctctttatagatcatttgttttggtggggttgacattgtcattctgctggcaatggccttatga

SEQ ID NO: 1018 - DNA, 937 bp, Mus musculus
  MOR245-15
atggaaagagtgaatcagtctgtggtgtcagagtttgtgttcctgggactcaccaactcctggagtattcaactatttctctttgtgttctcctccacgttttatgtggcaagcatgatgggaaacagccttatcgtgttcactgtggcatctgaccctcacttacactctcccatgtactttcttttggctaacctctctttcattgacttgggtgtttcttctgttacttctccaaagatgatttatgacttattcagaaagcacaaagtcatctcctttacaggttgtgttactcaaatatttttcattcatgtcattggtggtgtggagatggtgctgctcatagccatggcctttgacagatatgtggccatatgtaagcctctccattacctgaccattatgagcccgaggatgtgcatcttgttttcagtgactgcctgggtggttggccttatgcattctttgattcaactggcttttgtagtaaacttaccattctgtggaccaaatgtgttggacagcttctactgtgaccttcctcggtttatcaaactagcctgcataaatacttaccagctggagttaatggtcacagccaacagtgggttcatttctgtgggctccttcttcatactgatcatttcatatattgtcatcataatcactgtgcaaaaacattcttcaagtggttcctctaaagccctatctactctttctgctcacatctctgtggtgttcttattcctttggtcctttgatatttttctatacctggccatctccttcaacacatcttgataagtttctggccatatttgatgcagttatcactccgtttctgaatcctataatctatacatttagaaatcaagaaatgaaggtagcaatgaagagagtatgcagacagctagttagctataggaaagcttcc

SEQ ID NO: 1019 - DNA, 964 bp, Mus musculus
  MOR245-16
atggatggaggaaatcactcaatggtatcagaatttttgttgctaggcctcaccaattcatggagaattcagattctcctttttctgttcttcacagtattttatgtggcaagcatgctagggaacctgctcattgtgctcacaatcatctcagaccaccacctgcactcccccatgtacttcctgctggcaaacctctccttcattgatacaggtgtgtccagcatcgctactccaaagatgatttatgacctcttcagaaagcacaaagtcatctaccttgaacggatgcatcactcagatgttcttcattcacactgttgggggaacagagatggtgttgctcatagtcatggcctatgacaggtacattgctatctgtaagcccctccactacctgaccatcatgagtctcagaatgtgcattgttcttttggctcttgcttggatcattggccttatccattctgtggcccaattggcttttgttgtaaatttacccttctgtggagctaataaaatggacagcttttactgtgattttcctcggttcatcaaactcgcatgtacagacacatacagactggagttcctggtcgctgccaacagtggtttcatctccatggccaccttcttcatcctgattgtgtcttacatcttcattctggtcacagttcgtaaacactcctcaggtgcttcctccaaggccctctccactctctcagctcacatcactgtggtcgttttcttctttggtccttgcattattgtctatgtgtggcctttcccgactttacccatagataaatttttagcaattttcgatgtcattatcactccttttatgaatcctctcatctatacacttagaaataatgagatgaaggttgcgatgaggagactatttattagggctttacatttcaaaaatttttttattagcagtttaagagatttgagttaa

SEQ ID NO: 1020 - DNA, 883 bp, Mus musculus
  variation (173)...(318): Any nucleotide A, C, G or T
  MOR245-17P
atggatggggagaaccacacagtggtgtctgagtttgtgtttctgggactcacccactcctgggagattcagctcctcctcctcgtgctctcctcagtgctctacatattaagcatggctggaaacatcctcattgtgttctctgtgaccattgaccctcacttacattcacnnnnnnnnnnnnnnnnnnnnnnnnnnnnnnnnnnnnnnnnnnnnnnnnnnnnnnnnnnnnnnnnnnnnnnnnnnnnnnnnnnnnnnnnnnnnnnnnnnnnnnnnnnnnnnnnnnnnnnnnnnnnnnnnnnnnnnnnnnnnnnnnnnccatatgtaagcccctgcactaccctgaccatcatgagtccacgtgtaatgtgttttgtttctgggtgctgcttggggcctgggcattagccactcattgttccagctggcttttcttattgacttacccttctgtggcccaaatgtactggacagcttttactgtgaccttcctagacttctcagattggcctgtaaagacacctacaagttgcagttcatggtcactatcaacagtggtttcatctgtgttggctctttcttgttgcttcttatctcttacatcttcatcttgtttagtgtctggaaacattcttcaggtggttcatccaaagccctctccactctctcagctcacatcacagtggtgtttctcttttttggtcctactctgtttatatatacatggccccatcctaattcccagatagacaaatttcttgctctttttgatgcggttcttactccttttctgaacccagttatctacacattcagaaataaagagatgaaggtagcaataaagagagttttaaaagtattattaacttttagaaatatttca

SEQ ID NO: 1021 - DNA, 973 bp, Mus musculus
  MOR119-3
atggcagaggaaacaaggaataggacatgggtccgggagtttgtccttgaggggttccctgtggccgagcacctgagaatcctcttcttcctgatgcatttgctggcctacttggcttccatcatgggcaacacgctcataattagcatcacctgcgtggaccaccgattgcagacacccatgtacttcttcctcagcacttactcctttgtggagtgctgttttataactacagttatcccccagctgctcgccatctttctgtcagggaggcaaaccatctcctttgtggcttgcttcacacaggctcttgtggtttttgtcctgggggcaactgtttttttcctcctggctgtcttatcccctggaccgctatctggccatctgcaaacctctacattatccaaccatcatgagcccaaggatgtgctttctccttgttactgtgtgcttagttttgggattcctcttcatggctggtccagttgtgatgctttcccagtcatcctactgtggccccaatgttattcctcactttttctgtgattttgggccactggcaaatctctcctgttcagataccatgtctgttgagatgctgttttttaaccttgctttaattgtgctttttggttcccttctggtagccatctttgcatacagcaacatagtggtcacaatagtgggtctcccttcggccagggagaaacagagagctttttccacttgttcctctcatctcattgtcctctctctaatgtatggcagctgtgtatttatatacatgaagccaaagcagacaagcaggctggacaccaaccgagaggctgctcttgtgaacatggtagtgacaccccttttgaaccctgtcatctacaccctgagaaacaagcaggtccaccaggctctgagggatgcactgtccagggttcaattacccagatatcacaggagcagtgcaccttccctttga

SEQ ID NO: 1022 - DNA, 985 bp, Mus musculus
  MOR119-4
atggaacggctgacggcagaggaaacaaggaatgggacatgggtccaggagtttgtccttgaggggttccctgtggccgagcacctgaggatcctcttcttcctgatgcacttgctggcctacttggcttccctcatgggcaacacgctcataattagcatcacctgcttggaccaccgattgcagacgcccatgtacttcttcctcagcactttctcctttgtggagtgctgttttataactacagttatcccccagctgctcgccatctttctgtcagggaggcaaaccatctcctttgtggcttgcttcacacaggcctttttctttcttttcctgggagcaactgttttttacctcctggctgtcttatccctggatcgctatctggccatctgcaaacctctacattatccaaccatcatgagcccaaggatgtgctttctcccttgttactgtgtgcttagctttgggattcctcttcatggctggtccagttgtgatgctttcccagtcatcctactgtggccccaatgttattcctcactttttctgtgattttgggccactggcaaatctctcatgtttagataccaggtcggttgagatgctattttttaaccttgcattaattgtgctttttggttcccttctggtagccatctttgcatacagcaacatagtggtcacaatagtgggtctcccttcggccagggagcaacagagagctttttccacttgttcctctcatctcattgtcctctctttaatgtatggcagctgtgtatttatatacatgaagccaaagcagacaagcaggctggacaccaaccgagaggctgctcttgtgaacacggtagtgacaccccttctgaaccctgttatctacaccctgagaaacaagcaggtccaccaggctctgagggatgcactgtccagggttaaattacccagatttcagaggagcaatgcaccttccctttga

SEQ ID NO: 1023 - DNA, 207 bp, Mus musculus
  MOR263-8P
tcacacctggctgttgtgtgcctcttctatggcactatcatatccctgaatttcaactcctcatcttctcactcaactgggagggacatggcagctgccatgatgtacacagtggtgacccccatgctgaaccctttcatctataccctgaggaagagggacatgaaaaggggtttaagcaaagtgcttaccatgaatattcatcta

SEQ ID NO: 1024 - DNA, 933 bp, Mus musculus
  MOR257-6
atgggcaaggaaaatcagacatgggtgagtgaattcttgttgctggggttgtcaagtgactggtggactcaggtctccttgtttgtactgttcctggccatgtacttgctgactgtcctgggcaacctactcatcatcctcctcatcacactggacagcaagctccatacgcccatgtacttcttcctcagcatcctgtcatttgtggacatctgctacaccaacagcactgtcccccagatgctcgtgcactttctgtcagccaggaagtccatcccgtttcacagttgtgtgatgcagctgtatatctccctagcaatgggcagcacagagttcttcctgctaggtgccatggcctatgaccgctacgtggcagtgtgctaccctctgcactacatggtcatcatgcatggagggctgtgtctgggactggcttctgcctgtctgactgctggtctcacaaattcactaatgcagacactcatgatcttccacttacccttctgtcgtaaggtcatcaatcactttgcctgtgagatgttggctgtgctgaggctgagttgtgtggacatctccctcaacaaggtcatggtagccatctcaggatttctggtgatcatgctcccttgtattctggtgctgttttcctatgctcacattgttgctgccattctacgcattcgctcttcccaaggatgacgcaaagcctttgggacttgtgcctcccatctcacagtggtttctatgtgttttggaacagccatctttacatacatgaggcctgtgggcagatcctcagcaggacaggagaagatggttgctctcttctatgctgttgtgactccaatgctcaatccactcatctacagcttgaggaacaatgatgtgattggggctttgaaaagaactttggagaaacttaaggaaaaaaaa

SEQ ID NO: 1025 - DNA, 864 bp, Mus musculus
  variation (349)...(400): Any nucleotide A, C, G or T
  MOR257-7P
atgagagaaaacatgacctgggtaagtgagtttatccttatgggtttaacaagtgacaaaaacatccaagctggactctttgtcctctttggggtcacctacctgctgactctgctgggcaatggactcatcgtcctactgattgcactcgacccacgactccacctgcccatgtatttcttcctctgtcacctgtcagtggtggacatctgctacacctccagtggggttccccagatgctggcacacttcctcatggagaaaaagaccatctcttttgccctgtgtgggacccagctctttttgctctgactcttgggggaactgagtttctgttgctggctgccannnnnnnnnnnnnnnnnnnnnnnnnnnnnnnnnnnnnnnnnnnnnnnnnnnnagacagcagtcaccatgtgccttcctacctgtgggcacaatgtgctcaaccatgtggcctgtgagacactgacactggtcagactggcctgtgtggacatcaccctcaaccaagtggtgatactagcttctagtgtggtggtgctgatgataccctgctctctggtctctctgtcctatgcccacattgtggctgctatcatgaagatccattctacccagggacgccgcaaagcctttgagacctgtgcctcccacctgactgtggtctccatgtcttatgggatggccctcttcacctacctgcagcccgcctccacagcctctgctgagcaggacaaggtggtagtgatcttctatgctttggtcacccccatgatgaatcctctcatctacagtctgaggaacaaggatgtgaaggctgctttcaggcgagttctgatgaagaacattgagtcaaagaat

SEQ ID NO: 1026 - DNA, 892 bp, Mus musculus
  variation (314)...(333): Any nucleotide A, C, G or T
  MOR257-8P
atgggaaaagacaaccagacatggatacatgaatttatcctccttggcctgtccagtgactggaatactgaagtctctctcttcgtcctgttcttgctgatgtacttggtgacagtattggggaacttcctcatcattgttctgatcagactggacagcagactccacactcccatgtatttctttctcaccaacctgtccctggtgggatgtgtcttatgccacaagcatcgtcccccagctgctggctcattttcttgccacacacaaaacaatcccatttctgagctgtgcagcccagttatttttctctnnnnnnnnnnnnnnnnnnnnatactccgccataatgcatacaggactatgcagtaggatggctattgtttcttgggtcggtggttccatcaactcagtcatgcagactgctatcaccttccaactgcccatgtgcacgaacgtgtacatagaccatatatcctgcgagctgcttgctgtggtgaggctggcctgtgtggacacctctgccaatgaagttgctatcatggtatccagcatcattctcctgatgactccattctgcctggtcctcctatcctacatccagatcatctccaccatcctcaaaatccagtccaaagagggaagaaagaaagcctttcacacctgtgcctcccacctcactgtggttgccctgtgctatggcatggccattttcacgtatatacagccccactccagcccctctgtcctacaggaaaagttgatttctctattctatgcgattttgacacccatgttgaaccccatgatttacagtctaagaaataaggaagtgaagggggcttggcagaaattactgggacaattctctgagttcacatcaaaactgaaaacc

SEQ ID NO: 1027 - DNA, 435 bp, Mus musculus
  MOR34-8P
atggtcatgtcagcgaggaataacccagatctgaccccagcttcctttgttctgaatgggatcccaggcctggaacacatgcacatctggatctccttccctttctgttccatgtatgcagtggctatgatggggaactgtggactcctctatctcatcttctttgaggattccttacacagacccatgtactactttttagcaatgctttctctaacagaccttgtcatgtgctctagtacaatccccaaagccctgtgcatcttctggtttcatctcaaagaaattggatttgacgactgtcttgtacagatgttcttcatccataccttcatggggatggagtctggagtgctcatgctcatggctctggaccactatgtagccatttgctaccctctgcattactccaccattctcaccaatcctatcatt

SEQ ID NO: 1028 - DNA, 651 bp, Mus musculus
  MOR0-8P
ttgaaaaaaaatcacatcagagtcactaaaccaattcttctgggattcacaaacaactctgaaatacagatatcactttttgttttttttctggccatctacttagttgccttactgggaaactttcttgctttcacaataaacagggtagaccctactcttcaaacacacaagtatttctatctgcaaaacctatcacagcttgaagtttgtttcactctggtcatgataccaaagatgctggtagacctggtaaagtcatttctttttggggctgtggtataagggtttgttctttcttctttcctccctccatttcctcctcctcctcagctttgatgatggctctacctttcagtgtatgtgtgtgcatgtgtgtgtgtgttgatctagtcactgatgcaagtgcttgcatcctcttttcttcatcatgtttcacttttattatagtctcctatgtacacattgctggaaccactctgaggatgtcatttgcaacggacggccagaaggcattttttatttgtttattataccttactgtgatatactacttttatgtaacagccaacctgacctactgaaggaccagctccaactagtcttctgaaatcaagttctttgtcttatactgtctttatgtctatgtta

SEQ ID NO: 1029 - DNA, 648 bp, Mus musculus
  MOR214-7P
atcaaggcaaagattgaggaagaaaatacaactgagataacccaattcatctgtctggggttttcagattccccagaaatcacagaactattatttgacttatccacacctggaacatgtccttcattgttttaataaggatggattcacacctccacacacctagtatttccttcaaagaaatctactacatcagctcagcaatagaataatgctttccaaattcttccaagaaaagcaaactatcagctttgtgggctacatggtataatattttatctttttcactagggtgctaagtgaatctttccttgtgacagctatgcctatgacaagtatgctatcatttgcaaccccactgctctatcaccaatcatgttacccaccctgtgtgcttgggtgatggtagaatcttatgtgactacaaactcatcttctttacctcagatttgtaccttgttgcagctctacttctgtggacttaacatcaacagacgtttcttctgtgacatgccccagctgttaaatctgtcctacactgacaaattctttgtacagtttctgcttgccatatttacaaggttgtttagaatagtgaatgccttactcatctcaatagcatatgactatgtagccatatctgtagtg

SEQ ID NO: 1030 - DNA, 942 bp, Mus musculus
  MOR171-35P
atggaaggcatggcagcaagaaatcactgtgtagtgactgagttcttcttggctgggctctccaataaacaagaactccagctgcccctatttctcctcttcatacgattctatgtagtcactgtgacagggaacctgagcataatcacattgattgggctcaattcccacctgccaacacccatgtactacttcctcagcagcctgtccttcattgacttctgtcagtccactgttgtaacccctaaaatgccggtgaactttatggtcgaaaagaacacatcatctcgtaccttgggtgcatgactcagctctactgcttcctcatttttggcattgcagaaggttacacattagctgcaatggcatatgacccctttgttgccatctgtaaccccttgctttacaatgcaactatgtcctctcagatttacacttccttgattttcagtgtgtatatttttgctgtgttctgtatcagtaaatgtaggcttcatgtttaggattaaattctgcaaactagatgtgatcaatcattatttctgtgatcttcttcctctcttgaagcgtgcatgctctgatacctatatcaatgaaatgttgattcaatattttggtacaacgaacatctgtatccaaattctgactatttttacttcctacatcttcatattgccagcatcctttgtattcactccacagagagcagatctaaagccttcagtactttgcagttcccacatcttggctgttgctgttttctttggatctttagcattcatgtaccttcagccatcatcagtcagtttcatggaccaagggaaagtgttctctgtattttatacaattgttgtacccatgctaaaccccttgatctacagcctgaggaataaggatgccaatgttgccttgaagaaaatatttgaaagaaaaagattcata

SEQ ID NO: 1031 - DNA, 830 bp, Mus musculus
  MOR171-36P
atggacactgggaatcattctgcagcagttgtttgtcctggtgggattaacacagcagcctgagctcctgctgcccctcttcattctgttcctgggcatctatgtggtgacagcagtggggacatgggcatgatcttgctcatcacagtcagcccactgctgtacactcctatgtactatttcctcagcagcttatcctgtgttgatctatattattccactatcattactcccaaaatgctggtgaacttccttgggaaaaaaattttgattatctattctaagtgcatggcacagccttttctatttgtggtctttgtggtggctgagggttaccttctgactgtaatggcatatgatctctatgtagccatctgcagaccattgctgtataatgtgatcatgtcctctaaacactgcttactgttagtgctggtttcctttatcttagacatttttttttctgccttgacacacacaagtgctatgatgaatctgagcttctgtaaatcccacatcataggtcattccttctgtgatgttctcccttttgctagcctttcctgttctaacacacgtttcaataaacttcttttattattggagggatcaacaccttagtgaccactctagccgttgccatctcctatgtcttcatcttgtgcagcatcctgtacatcagttcattgaagggcaggtccaaagcattaggagactgcagctctcatgtcatggctgtgggaattttctttgggtctatcaccttcatatatttcaagtcttctaagatattaatattttattattttattaatattttattttactaa

SEQ ID NO: 1032 - DNA, 549 bp, Mus musculus
  MOR171-37
cccctgctttacagtagcatcatgtctcaacataagtgcctttctcttgttttagtagtttacattataggtataatttgtgcatcagctcatgtagggtgtatatttagagttgatttctgcagatttgatgtcattaaccattgtttctgtgatcttatttctatccttaagctctcatgctctaatatttttgtgaatgagctcttaattctaatttttagtctaattaataccattttcccaaccctgaccatcctcatttcttatactttcatcattatcagcatcctgcgcattaaatctactgagggaagatctaaagccttcagtacctgcagctccctcatctcagctgttgctgtctttttcggttctgctgcatttatgtatctgaaaccatcatcttcaagctccataaatgaaggaaaaatatgttccatattctacaccatctttgtgcctatgctcaaccccctaatctacagtctgaggaacaaggatgtcaatattgctgtgaagaaaattatagaaagaagatcatttttc

SEQ ID NO: 1033 - DNA, 932 bp, Mus musculus
  MOR135-23P
tttataaaacaaagaaaaatcgaggttggcaactgttcaaccactgagttccttctcttgggaattaccaataagcccaagatcaaggtgattttatttaacagttttctgtttatctcattattctttttgaaaatcttggaatgatcattttgataagaatgaataccaagcttcacacattgatgtacatttccttagccaactctctttctctgatatctcttactctactgcatttggtcccaaaatgatgaatagccttcaattacatgtatttgatgttctgtgtagttctttatctctaacatttttacagatgctgagtgtataatgctagcagtgatgactcttgacaggtataatgccatcagcaaccccttgatgtatgcagcagatatgttcaagtggtgtgctctcggctcctggctgtggttttatctgtttggaatggtagatgctttgatacatacaatattgacatttcatctgtgtttctgtgggttcaaagaaatcaaccatttcttctgtgatatccctcctctcctatcactattttcctcagatatagaggtcaatgaactagacatattcatcctatgtgagtttactaagatgagcaccatttcatgagtcctggtcttttactgttacatcatctcattagtcttgaagatctgctctgctgagggcaggttcaaagcagtctccacctgtacctcccatccaacaactgctgttgcaattttccagggaatgatgtccatcatgtatttccagccaagttctgcttattccctgcatcaagataaaatgacctcattattctacactcttgtgatcttcatgctcaacgcagtgatttatagcctcaggaatgaagatgttaaagcaagtgtaaaatgtccctgaaaagtagaatttcagattaa

SEQ ID NO: 1034 - DNA, 1046 bp, Mus musculus
  MOR0-9P
atggaaatggaaaatgtaacactgctgacagtttatcttaatagaacatcaaccacagtggaaactcccttcttcctgtcattgtttgtaatcaatctcatctccaatgcaggtatttcagtctgatcaacttctgggtgatactcactttcacatccccatgtacttattcctcagcaattcaccctttgtgaatagttggttgccttctgaattattgatcaccttctctctctctctctctgtctctccctctgtctctgtctctgtctctctctctgtctctgtctctccctgtctctttctgtctctctctgtgtgtctctctctgtctctttctgtctctctctgtctctctctctctctgactctgtctctgtctctctgtctctctctgtctctgtctctctctctctctctctctctctctgtctctctctctccctccctccgtccaatatgctgttttcctttcagtgtgagtgtcaagtgcttcttcactccaagggctagaattgctatatagctatatgcaagcctttactttatccaataattatgaccaatagccaatgtttccacctagagatttttgtcacctgagggtggttttcttcatgtcttaacttatgagatatttttattcagaataactttctgtaattccaatgtaatatatcatttttattgtgacgttatgctttttttttttttttaagatttcctgttctgattcttctattagcttcctgttgatgtttggtttagctgatacaggttggagatccaccatagtgagtgttctaggcttttacataattctctttacactcttactaagtaagtgtttcaaaggcataaaaaaatgccttctctacctgtggagcacatgtcctctgtgcgtctttgtattatgtctctcttcatgtatgtacgccttgcttctagatatgcagatgctgagattgactccctattttacactgtcatagtcactatgttaaacataattatctacagtatttaaaaagcaaataatagattca

SEQ ID NO: 1035 - DNA, 899 bp, Mus musculus
  MOR203-6P
atggaacacagtaatgactccaaagtgactgaatttattctcctgggattcgctggtcaaaatgagtcttggcacatcctctttgcggtattcctagtcatttatgtagccaccttagtgggcaacattggcatgatcctgctcatcaagcttcattcttcactgcacactcccatgtactttttcctgcagcatttggcttttgttgacctctgttactcctatgccatcactcccagtgacactggggcactgcaaaattttatgagcacaagaccatccttccccttcacaggatggacaatgcaattgtatatctatggtatctttataaacagtgactgattcatcctagctgctagggctgtagacagctatgtggccatctgtaacccacttcactgtcctattatcatgtcccagagatggcattctggtgcctctgtaaatacaggttttactttctactgaaacttttgcagatccaatgccattaatcatttttttctgtaatgtgccacccatactcacaccttcttgctccagtactgacttcaatattgtgctgttgacagttttgtgggttttaactttatcttctctgtgtctgttgtcatatttcctacacacatattttggctgccatcctaagaatgttttctgctgcaggaaggataaaggctttctccacatgtgtgacacacgtgaccacaatcaccatactcttccgaacagtctgctacatgtatgtacttcatgggatcaacagatctcaagagcagaagaaggtgacttatgtgtcctattttattattattcccatgttaaacctcctcgtgtgtagtgtaagaaaccaagatatgatagaagtcttgaggcacatagaaaacaaatgtttg

SEQ ID NO: 1036 - DNA, 581 bp, Mus musculus
  MOR223-7P
tatgacaggtacctggccatatgccaaccccctggcgttacccagtcctcatgtctgctaagttgagtaccttgctcgtggctggagcttgggtggctggcttaatccacggagcaatccaagccatcctaaccttccgcttgccctactgtggtcccaatcaggtagattacttcttctgtgacattcctgcagtgttgaagctagcctgtgcagataccacagtcaatgagttgttcacctttgtggacattggagtggtggttgccagttgcttctctctgatccttctttcctacatctatatcattcgggccatcctgaggatccgtacagctgatgggaggcgaagggccttctcaacatgtggggcccatgtaaccatggttaccgtgtactatgtgccctgtgccttcacctacctgcgacctgacagccatggcatcctggatggggcggctgctctcttccccacagccatcacacctttcctcaatcccctcatctacaccctgaggaaccaggaggtgaagttagccttgaggagaatggtaggaagccaaagcactaagagtgggggc

SEQ ID NO: 1037 - DNA, 941 bp, Mus musculus
  MOR167-5P
gtaaacatctctttggtgactgaattcattgtggtaggatgagcagagcagcctgatctccaaatacccatgttctttgggtttctggcaatgtacccggtcactgcattggaaaatttgtttttgataattctaactgtgctgaattctcacgttcacaccactatgtacttttcctctttaacttgtcctttgtagtcctttgctattcttcagtgttcactccccaaatgctgatgaactttataataaggaaaaatacaatttcttacatggaatgcataacctagctcttctttctttctttctttctttctttctttctttctttctttctttctttctttctttctttctttctttctttctttcttgagtgttgcgttttgacttcaatggcctatgatctctatctgtaacccactgttatataatcttttcatgtcccctaagtaatgtttgaaccttattcttggctcattctttatttcattttccgatgctgtagcacactctacatgcaggttgaaactgacattttgtgatgtgatattcctcctttgcttcagctctgctgtacaagcacatatgtcaatgagcttgtaattttttttttttggttgggtgcattaatatcattgttccttcttcaactatacttatttcctatgatttcatcctctccagcatgttctgcattaaatcatctgagggtaggtccaaagcctttagcacctacagctcccatgtcatttctctttctctgttctttgattcaagtgcatttgtgtatttcaaatcctcctcagctgggtctttgggtgaagaaaatatttcttctgtcttttattccaatgtggttctcattgtgaatcccttactctacagcttgaggaacaaagattaccctcaggaaaactctgaccaggaagaacttttga

SEQ ID NO: 1038 - DNA, 966 bp, Mus musculus
  MOR0-10P
tctgagcccaactggacagtgccgcaggagtttgttatcctaggtttctcggggtggccccagggcctccgagtgctgctgttctctctcctcttgccgctctacttggccactctggctgggaacctgctaattctgggcctggccctggcagaacccaccctgcacacacccatgtacttcttcctgggctcactgtctgcagtagaggtggcctacacactggtactcaccccgcggatgctggctggcttcctcctgcctcctggtggccaggcagtagcaccctccacctgtgctgcccagatgggtctattcgtggctctcggtggctcagagtgcctgctgctggcagccatggccttggaccgctacctggctatctgccgccctctctactacccctagctcatgacctctggactctgttgggcccttctagcttgctgttgtttgggtggctcaatcctagccttaggccttaccatggctatattccagctgcctttctgccacggtggccttgtcaatcatgtcttctgtgatctccccgcggtgctcgtgctggcctgtgggaatcgggagcttcaggaacacgtgttactggcggcctgtatgcttctgctggtgctgcctctaatccttatcttgctgtcctacaccagagttctggtggtcatcctgggggtgggggatagcgcgggccgccgcaaggccttcaacacagtggcatcccatctcacagtggctgtgctccactatggctgtgccacagccatgtacgccagacccctgagcagccgctccctggaggaagataagctggtgtcgctcatctacattaacctcacaccgctgctgtacccagccatctacacgctgcgcaaccgggacatgcagggtgccctccagcgtgtggtcagccagaggacgatggggacggtccagcaagctgatcttgtctag

SEQ ID NO: 1039 - DNA, 710 bp, Mus musculus
  MOR239-8P
atggagcagaacgtcagctacagcagggtgaaagaatttgtttgtgaaggactgacggacacagtcccaagagctgagtttggtcttcttttctcttcttggtgtacacagcaactgggctgggcagcctcctcatcatggtcacggcaacctgagagtgcctcctccacacccccattttttctctctctgtgatgacatttgatcaatacatggccatctccaagcccctacaatatgtgagcatcatgagtagtaggcggtgccagagcccacattgtggcttcctggtgggaaactttgtccactccattgtgcagatctccctcttactcccacttcctttctttggacccaatgttgttgatggtttctactggtgatgtcccacaggccctcaagctcacttgtaccagcacctttgctctgaggtcttaatgattgctaccaatggtttgatcactaccatgtggtttgtctttctgctagtgacatacttggcaacactaaggtcatacacaggagaaaagtcatctcatcctgtacccaaatcactgtggtcaccctgcactttgtaacctgcatttatgtcctttactgccctccccatggacagagctgtctccatcacattcactgtcatcattcctgtcctcaacccaatgatctgtaccctgatgtcttagtcaggttttctatccctgcacaaa

SEQ ID NO: 1040 - DNA, 449 bp, Mus musculus
  MOR133-4P
tatgaaaagaaatatactgagatgacccagttcattctcctgggattctcagatttccaccaaatcacagctctgcaatttattatatttctgtacctagaacttgtgcctcattgttttaataagaatgaattcccacctccacacatccatgtaagtcttcctagtgatctgtccttaataggcctctactatataaactcaatggaccccaagatatcacacccatctacagctccaggtccaaaggatccagggccaccttctggcctccacaggcatgcacatggtgcatatgcatacatacaggcaaaaattcatacacataaaataagtaattttttaagtcatgtagaaaggaaagtcacttcttggccatgactcaagagacaaaattattcatgctattagtttacatccctggagtgaagttctatttatcaagcatc

SEQ ID NO: 1041 - DNA, 746 bp, Mus musculus
  MOR177-13P
ggacataggaaattttccttgaatgaattcatttttgcaggatttgccaataaccctgagatgaaagggataatttgtcatgtttctagttatctatctgattaatcttctgcagacggttggcatgatcattttaatgagaatggatccccagctccacacatccaagtacttttacttgagccatctctctttctctgatttctactatttcattgcaattgttctcaaagtgtcagtaggtatatttggctagaacaaataaatttgcttaaggggctgtgctctgtagttcttcacttcctgcacctttgcagattgagtatatagtactggcagcgatgtccttgttagataccaggccatcagccactcttgctctacataccacacaggcccaacagtgtgggtacctcactgctgatatttacctggtgagaacattagatgctttgaaacattttcccttggctttccacttatgtatctctgagtccaatgagatcaaccatttcttctgtaatttatgtgtactttaccttctctcctgctcagatacacagtattcaatatttatgatttatttgtgctgagcacccttgcaagtatccttatctgttactgttacaccatttaatctgtcctggaaatgcacttttctgagtggaggttcaaatatttatgtctgtaccttatgcttgattgcatttgccaattttcaaataactttaatcttcatctattat

SEQ ID NO: 1042 - DNA, 661 bp, Mus musculus
  MOR264-15P
aaaccaccaatcaaaaccttcagaaagaaatcaaatcaagctaagagatgtgttctataattttctgaatttcccacttccagtggtttccattggactcttatttattacatactcctttattctactgggcaatgacaccattgtactaatcacaagggtagttttttcctttggcaaattttcttttttagagatatggtatatatatattactcttcctaggatggtcttgggactcaaaaaagagctatgtctttcattgcctgtgctacaaaactgtgcttcactcctaccctgggagccacaaagggatttctcctggctgtgatgtacaatgacatttatgtggctgtcggtaaccctctgctctattctctactcctaagactcacctgtggatcaagctctcagctggatcttggttcagtgggatgaattctggtacaggtagattgcagacaacacaaagtttatatcacttgctggttcccaccacaccaatcacatcttttgtgacttccttgatatttcagcttgcctgtgaaaacgtttataaacgagatggtgatcttcctagatgctgttttgttttgctgatcttcatttcttttatttacttataatatattacaaaattctgacataattattatctaaa

SEQ ID NO: 1043 - DNA, 303 bp, Mus musculus
  MOR281-2P
ccatcggccgagttgacgtcacggggaaggcagagcacatggagtgaagaaccaccctcggcacatgcgcagattatttgtttaccacttagaacacagctgtcagcgccatcttgtaacggcgaatgtgggcgcggctcccaacataatacttctgtggcccctttgctaaaccctttcatttacaccctaaggaacaaacaggtgaaagaagctttcaaacatgtgcttcatagattttgttttctacaaaacaatgagacaatgttcagacatgctgttgaaacatcaggagtaaaatag

SEQ ID NO: 1044 - DNA, 826 bp, Mus musculus
  MOR171-38P
cccaccatgctctagttctcttacatatgtacatattctgctggggaagagaggttgtttacaccactagaattaataggccatatggtaagttgatcatttttagttttaagctctaccaaaatgtcattaacttctaatgatgatgagctttgtgcaagacaatgatgtcactccttccctgaactaaatgactctgctctcttccttcctaatatttgttacatatgttaactggtggcatgcaaccagtggcatatgaccactacgctgtcaccagcaactgcttggtaaataatgtcatcagtcttaacaagtctgtttctggatggtaagtgagatgcatgctatgggcttcactgaagatacaattcaaacactctgcatcctgagagtgcttttatgcaagggtaaagtgatgtgaaacaactgcttctgtgatcttcttccactgcttccacttgcctactccagtacttttgtcaataagatagtgcttctgtacaacagtgattcaatatgttccaacccaggccactatagccccttacacgttcaacatcacctgcatcctatgtataaaatccaccaatggcagagtcaatgcgtttagcagctacaattcccacttctttgcagttgttgtctttcttgttctctggcttcatatattttcaaccttcatttgctccaagaagaaaaataaagcatcatctctgttctatacaacaattgtgtccatgctgaattctctgatttaggcctgaggaataagtatgtcaaatttactctaaggaaggtggtcaagaaacagaatttgcacgtg

SEQ ID NO: 1045 - DNA, 693 bp, Mus musculus
  MOR171-39P
gtggttctgctgattctagtaaaataaaatattataagtaaaagttttataatcaccatcagttcccagcttcactctccagtgtattctctcagtcatttatccttcattaacttctgctattcatctgtcattatccctaagatgttggtgaacttgtatgtgagaaggacatgatctttttggagtgtatgattcagctgtacttcatcatttttgtcattgcaggaggctccctgctgacagccacaacctatgactgccagggtccagcctctgcacaggatcagagttctaaactggaagcagggatacctggaagacgcataacaaacacacatagacacctttttcaggaacaatctctcaggcaagtttcgaggcttgaggttgctcttcatctctctgtgtctctttgtctctatctctgtctctctcttctgtctctgtctctgtctgcacatactcttcactctcctgcacactttgcttttctcttctgcactttgcttttctcaaactccccatgtttctacacacctctgtgtactcacctttcactcacacatatactatttacacacacctcacacacattcctctcatgtgttctttcactcacatagacacacccctcacactcactctcttcttgtactctttctcacacactccatattcctcttgcctttt

SEQ ID NO: 1046 - DNA, 669 bp, Mus musculus
  MOR136-17P
ttatttttcaagttctattattagtcttagtcatttttcattacccacagaaaaaacaatactgacctgagcagctttccaattacatcaatgatgtatgtccactatatctccactacattagtatcatgagaaaagagcttggtgcattattagaagctgttttttggatcttgtacaatgccagctccttcacttgcgtcttctaacattgttgctcttctgtgctgatggcatgcttctgttaagacctaactgccatgatcaaattatcctgcttagataccttcctaaaagaattggtcatgttcacagtcagggtggcagtcattatttggcatttatatgtacattggtatcttatggatacactggggccacagtcctgaggggcccttcgaccatggggatttataaagcattgtatacacatggcttctacctcttggtggtgtctttatattatgggggtattttggatagtaccttttcccagaattaagcaataggatggacaaggacaccattatagctgtcatgtaaacagctgtcacacccatgttaaatctcttcatttgtaatctaagaaatagggatacaaaagaagcactagggatactcttgtcaagtaagaggttttacatgataacatctgaatactttcactga

SEQ ID NO: 1047 - DNA, 935 bp, Mus musculus
  MOR175-8P
atggaagataagaatgagaccatagtgagtgagtttttatttctgagcctcacaaatcgtctctatcagaagattatacttttcatcctgctcctctttatcttgtgacactggggggggcaacttgggtatggtcactgtaatatgggtggaccccagatttcatacttctatgtacattttattagccacttgtcttttgtagatatgtgttcctcttcttccatagctcctaggatgctgtatgatatatttacagagaaaataaaaacatctcctttgtgtgttgtactgtatagttatggtttgctggtctttttgagggaactgagtgtttcctcctagctgccatggcatatgatcagtacacagccacctgtaagcccttactgtatactctaattatgtccaagagggtctgtgcacagtttgtcatttggccttatcttctggctgctataaacatcaaaactcatgaaaccttgaccttttgcttaccattttgtggttccaatactatcaacatttcttctgtgatatttccccaatgcttgtcttagcatgtgctgactcctccatcaacaagatagtggtctttgtcttggatggagcaataggagtgtttagtggtgtgatcatcacagtctcctacatctctattttgatggccatcttgaagatccagaccactaacaggagaatgaaagacttctctacttattcctctcacttggcaggtgtctctatccagtatggaactgtgctcttcatctatgttcgacctagtacatatactgaacacgaataaagttatttctctattttatactgtcatgatttccatgctgaatcccctgatctatagcttgaggaacaaggaagtgaaaaatgcactcagaagaaaagtacaaaggaaacatttttcaagagattgg

SEQ ID NO: 1048 - DNA, 763 bp, Mus musculus
  variation (746)...(763): Any nucleotide A, C, G or T
  MOR0-11P
atgaaagcctttagcagccccagcaactccagcaccatcactggcttcatcctcctgggcttcccctgccacagggaggggcaaatcctcctctttgtgctcttctccattgtctacctgcttaccctcatgggcaatgcttccatcatctgtgctgtgtgctatgatcttcctccttctctttctttctatcccaaacagtgcttgggaatatctcaaattagaatgactatggacagttatatttccacacaatttctttttgttttcttttttctttttaaattttttcagtcaactttttatttatttatttatttatttatttaatttacatttcaaatgttatcacctttcctactttcccctcctaaaatcccctatgccctctcccctccctcctgtttaccaacccacctattcctgcttcctggccctggcattcctctattttggggcatagaaccttcacaggaccaagggcctctcctcccattgatgacctactaggccatcctctgctacatatgcatctagagccatgtgttttctctgattggtggtttagtctcagggatctctgggggggtactggctagttcatattattgttcctcctatggggatgcaaaccccttcagccccttgggtctcttctctagctccttcattggggttatgtttttctaaattctattaccccaaccatctatgctacacttagatattcagcttggtttttctcnnnnnnnnnnnnnnnnnn

SEQ ID NO: 1049 - DNA, 690 bp, Mus musculus
  MOR162-9P
gaatgttggtgggttttgtgaagcagaacatcattttctcatgctgagtgcttgactcagctttttttctttgccttctttgttattgatgaatgctacattttgacagcaatggcttatgacagatatgctgccatttgtaagcccctgctttaccaggtcaccatgtctcatcaggtctgcctattgatgactatgggtgtgtatgtgatgggctttgcaggtgccttgtcccacatagtttgcatgctgagactcaccttctgtgatggtaacatcattaatcactatgtttgtgatgtacttcctctccttaaactctcctgcacaagtacctccatcaatgagatggtagtttttattgttgtgggtgtcaatgtgatagtgcccagcctgactctctttgtttcttataccttaatcctttccaacatcctcagcatccattctgcagaaggtagatcaaaagccttcagtacctgtggctcccatgtgatggctgtttcttttttctttggagctgcagccttcatgtatcttaagccttctagtgcatctgtggatgaagagaaattatctaccatcttttataccattttgggtccaatgctgaatcctttcatctacagtataaggaataaggatgtccatcttgcactgagaaaaacattgatgaaactgaggttttcc

SEQ ID NO: 1050 - DNA, 832 bp, Mus musculus
  MOR162-10P
ggccacacctcctaatagtgccaatccctaggccaagcatttatcctgctgggcttgacacaacagccagaacttcagctacctctcttcttccagttcttgggaatctatgtggtctccattgtggggaacctgggcttgattgttctgattgtcttgaatcctcacctccacacccccatgtactactttctcttcaacctttccttcacagacctctgctactcctctgccataacccccaaaatgctggtgggttttgtgaaccagaacatcatcgctcatgctgaatgcttgactcagctctttttcttctgcttctttgttcttgatgaatgttacatttgtacagaaatggcctatgacagatatgctgccatctgtaagaccctgcttaaccaggtcaccatgtcccatcaggtctgccttggaaatcacaaaaggctggattatattatattcagaaatggaaaaatcaaaaaaatctttttaaatgtacatatctattttattattttttagtttgtttggggacatcatatccctaaagtctttcatgctaagcaagtgtttaaccactgacctacatcttaagagtaggcacatttgtaagttttgtgtggctgtctcagacaatgtcttactacttcacatagcaaacctctgggataatttataggagagttcattttaaaggctcatttgctgctcaaaaggctgaagtaaggagggaaaatgaaaactcctttctttctggtcttttttcattgtcttaaagcagtttcgtaaagagggcttaacaagttatcaaccaagcaatatacatgactcc

SEQ ID NO: 1051 - DNA, 657 bp, Mus musculus
  MOR0-12P
gaatctggtcccctcccccttccttcataactagtgtggcaacaataaaatttgagctttgatcagagtaactgtcttggctacatctctttctctcgccccctagcccctcttctcttccaggtttccaaaatgcatttccaggctagaacccaggttgtggtctgctggccggacacaacaattaggtttgctggaagctctgtccacacaggctgtgtctttctataaggacatgccatcaatcactaattgtttaatattctgaccctccttcaactttcttgagccaccacctatgttaatagtggtaattctgataggtgtattatatcacagtccccagttttaccatccttatttcctatgttttcatcttcattaacattctaaatatcaaatccatgcaaagaatatcaaaagacttcagtatttgtagatttcacattgcttcaatttatgttttcattgagtttacagcattcaagtgttttaaatattcatatggatctatagaccaaggattttattttctgtttctacactgatgtgatactcatcctcaacattataatctatagtatgtgtatcatggatgtagaaatggcacttatggatgctttgatgaaatttcagagaaatgtatttcatttatag

SEQ ID NO: 1052 - DNA, 829 bp, Mus musculus
  MOR171-40P
ttgcaaattctttggaaaaagaaggggattgcagagcttcagttgctactgttcttcaacttactagtggtcacaattgtcggaaacctggacacactcatctccattctgtttagttctcaactacacacacctgttgttatttactaagccgtctgctctttattgactgctctaagtccaccgtcattactcccacaatgctgctgaactttgcgacagagtagagtgtcatctgctactaagaatgcatacctcagtactacttctgtgcttttggtgctgcaaaatgtgttctgctggctgcagtggcatatgacctctgtgttgctgtccacaatcctttactttacaatttaatcatatcctatcaactctggtcctagattgtggttgggtatatggtaggggtttactatgtaccgtagctcacactgtctttgtgctaagagttttttgtttcctgcaagactggtatattaaaccattactctcgggttctagtacttttatcagtgaattattagtccagtgcatttaatctcactcttctatgtctgggcattcttagctattatatcttcatcatttttagtttattccaaagtattcaaagtacttcaactgacggcaggtccaaagcctttagcacttgcagatccagtattttggctgttactgtgttttggggttacatcctagcattatcttcatagacgaaggaaaagtgttgactatgtcttataccatccttgagtccatggtaaaatcgagaatctatagcctcagaaataaagatgccaaagtggccatgaaaaactatccaggg

SEQ ID NO: 1053 - DNA, 914 bp, Mus musculus
  MOR214-8P
atgaatgccaggggaaacagtactgagatcacccagttcatcctcctgggagtcacaaatttacccagaataataatactgctctttgtcacatttctgctcatctacattacaactctgacctggaatctgtccctcattgtgttaataagaatggattcacacctccacactcccatgtatttctttctctataacctgtccatcataggactttgctatgtcacctgcacagtcccaaaaaaaatgctctcaaactttttccaggaaaagcaaactatcagctttgtgggctgcattgttcagaattcatctttttcaccatggggctgagtgagtcttgtctcatggcagccatggcctatgaccggtatgctgccatttgtaaccctcttctgtatgcatcgatcatgtcacccactttttgtgtactgaaggtgctggaatcctatctctctgggatcactgcttctttacttcagttgtttgctttgcttctgtggaactaatgtcatcaagcacttcttttgtggcatgccacagttgttagttctgtcctgcatagacaattcctgactgccatattaacaatgatctttggatttgtaaacatgctagttatcatgatatcttatggctatattgtcatgtccatcctgaagatcacgtcagctaaaggcagatccaaagcattcaacacctgtgctccacacttgacacctgtttccctattcctcacctccagtatctttgtctatttgagttcaagttctggtggctcctccagttttgacagatttgtgtctgttgtctacactgtggtgattcccgtgttgatccctttgatatacagtctgaagaacagagaaatcaaagatgctatgaagaggttaaagaaaaagacaatctgcagc

SEQ ID NO: 1054 - DNA, 859 bp, Mus musculus
  MOR137-1P
accctcctcctggggttccccatcagaccagaacagcagtacattttcttcaccctactcctggccatgtgtctgacaactgtgctcttcatcctgcacatcctgaactcatctccacaccctcatgtacttattcctcatcatcttgcacatatggctggattctcacccccaagtccccatgtacttctttctcagccacttggctttctgtctcatcagttactgtctcagagatgctctggagcatccagactcagcacctaagcattccctatgaggggcatttctcaaatctagtttttccttactttttctatatgttggcaatttgcttcttgaaatggtggtctatgagaggtatgtgtctatctaacatccactgtattacaccattgtgatgagggaggagctgtatgacttactggtgtctgggtgttgcttcatttcttatatacataccctgttgcatactccctcctgtgtcatccatcccttaccatttctgttatttcaatgagcacttgaagctgtcctgcctaaacacccccttcaatgagttagtgatcttcattgagggagtgttgactttcctgccactgggtaccatttcaggcccttatatctgtactggggctactgttctaagtgtccctccatgaagaatatctacaaagttcttcatggtgcttttgcactataggtacttgcaattatttatttctttcatttctcaaataattccaaatttaaggttgtgattgtttcagttatgtacacagtggtgacaaccatgctgaaccccttcatctacagcatagaaatataaaaattggcacatggaccactttatagaaaa

SEQ ID NO: 1055 - DNA, 915 bp, Mus musculus
  variation (501)...(603): Any nucleotide A, C, G or T
  MOR189-4P
atggaaaaccacagcctcacattggtgactgaattcatcctgatgggtataactgaacgccctgaactgcaggccccattgtttggactgttcctcatcatctatattttctcactggtgggcaacttgggcatgatcatccttaccatggtggaatcaaggctacaaacacctatgtacttttttctcagacaccttgctactactgaccttggttattcaacagctgtgggaccaaaaatgttaagaagttttcttgtagaccaaaatagaatatcatttcatttctgtgctgtccagtttgctttctttagcatgttcattattagtgaattttttattctgtctgcaatgtcttatgaccgttatgtcgccatctgtaaaccactcctctataatgtcattatgtcacaaagagtgtgttgggtcctagtgacaatcccatacctttagagtatatttgtcgctctcatagccaccataaatattttttcttcttcnnnnnnnnnnnnnnnnnnnnnnnnnnnnnnnnnnnnnnnnnnnnnnnnnnnnnnnnnnnnnnnnnnnnnnnnnnnnnnnnnnnnnnnnnnnnnnnnnnnnnnntcaccactggtcatccttgtttcctatctgctcattctcagagctattctcaggatgaactctgctgagggcaggcagaaggctttctccacctgtggatctcatctgacagtagttattgtattctatgggacattgatttttatgtatgtgcaacctaagtccagtcactccttaaacactgacaatgcagcttctattttttataccctaatcatccttatgttgaatcccttgatctacagcttaagaaacaaagatgtaaaatattccattagaaaaacagggaaaaccatacaaaatatcttttcc

SEQ ID NO: 1056 - DNA, 902 bp, Mus musculus
  MOR188-6P
atggagaaatataatctcacaatggtgactgaattcatcctggtgggcatcccttaccaccctgagtttcaggtactattgtttggactgttcctcatcatttatctgacctcactggttggcaacttgggcatgatcatccttgccatggtggattccaggctgcaaacacccatgtacttctttctcagacatcttgctactatagatcttggttggagaccaaaatgttaaacaattttcttgtagatcaaaatgcaatatcattttatgcctgtgctatccagttatctttctttagtatgttcactattaagaaatttttattctttctgcaatgtcttatgactgttatgtggccttctgtaaaccactcctctacactatcatcatgtgataagcaatatgggcatgatcctcattactattgtggactccaggcagaaaacacccatgaacattttcttcagacatgtagcaactacaattttcatttattaaacagctgtcaataccaaaattttgagatattttattgtggatcaaaaccagtatcttttagactttttgcttcacaaattagccttctatattttcctcatagcttgtgagctttttattattttataatctctgtgaccagtatgtggccagtagcagcaaacctctgcttttatggtcatcatatcaaaaagagtttgttggtgtctagtggcgatcattaactttacctgacaactttgcctgttataatgaaaattaagatgtttactttgtttttctgtgtgcacaagtcatcagtaatttctaatgcaacagtcttcctttttaacgttgctctgttcgaatattcacaaaattgaacagatcatttgatctcttcagcttttttccctcttttc

SEQ ID NO: 1057 - DNA, 828 bp, Mus musculus
  variation (416)...(435): Any nucleotide A, C, G or T
  MOR191-2P
atggagaaacagaatctcacagtgctgagtgaattcattttgaaaggcatcactgaccgtcctgagatgcaggccccactctttgggttgctcttcattatctatctgatctcagcagtgggtaatttgggcatcatcattattactaacgtgggctccaggctctgcatacccatgtactttttttctcaaacatctggctttcactgatcttggatattctacagccattggaccaaaaatgttagttaattttgttgcagagaataattcagtctcctattacctttgtgctacacagttagcttgctttcttctttttattacttgggaacttttaattttttcttcaatgtcctatgaccggtatgtgcctatatgtaaccctcttctctatactggcatcatgtcacaannnnnnnnnnnnnnnnnnnntgaattttgggtactaatcctaactttttttattataattatattagagaagaaaataaaagtgcccttgctttccttcagggggaagggagaatttaaatagcaggacttgagtacactctgtatagagtagtatcacgttgaagtgtcaagtgatcacaaatgtgtgtcattgagttttatgatgtctgggaaagccaaagagactttgaattgtttgtgtagtttattaacatttcagtgaaaaaaaatgtagggtccattgtgtgtttatttctgtttttctatggtgtatagaggcaggctttctattttaggctacaattcatttatatgtgttgccttcaaatgaaatttgattatgacatcaaacttctaatttcagttcattat

SEQ ID NO: 1058 - DNA, 813 bp, Mus musculus
  variation (582)...(687): Any nucleotide A, C, G or T
  MOR248-13P
atggatggaggcaatcaaacaattgtatcagaatttatactccagggacttgccaactcaaagaatattcaggtcttactcttcatgatattgttgactctttatcttctcatcatgtctggaaatattgtcatactgatcttaataactactgacccccatctcctttcccccatgtacttcttgttggccaacatgtcctttgttgatatgtggctctcttcaaacatcactcctaagatgatcacaggttttctcagggaaaacaagaccatttcctttgcaggatgcatgtttcaggtctttttttcccattgcattgctgcaggagagatggtgctgttggtggtaatggcttatgatcactatgtggccatctgcaaaccactccactacatcaccatcatgaaccttaagagatgcactgggttggtgttcacttcctggataattggctttattcatggtataagtcacttggtagtggttgtgcatctgcgtttttgtggtcccaaggaaacagacagtttcttttgtgacatgccactggtaatcaagctagcctgcatggattcccataannnnnnnnnnnnnnnnnnnnnnnnnnnnnnnnnnnnnnnnnnnnnnnnnnnnnnnnnnnnnnnnnnnnnnnnnnnnnnnnnnnnnnnnnnnnnnnnnnnnnnnnnnataaagttgtactttacactttttgaccaaactcacatgtttaaacagggaataaaatattaataaatttttcccgagtattcatctgtagatgctatacatacccccaaattgtcaacttctatt

SEQ ID NO: 1059 - DNA, 706 bp, Mus musculus
  variation (267)...(286): Any nucleotide A, C, G or T
  MOR0-13P
acacacacggaggactctaatcaaactgtggtttctgcgtttatttttcagggactgtgtacctcaaggcaacttgagatcttcctcttactaccattttctgtcctctatctgatgactttggtagataacctctttgtagtgatattgatcatcactgatcatcatttcaattctcccatgtactttctgtcagctaatctatcatttggtgacttctacctttcctcagtaaatacacccaaactgaccatagatctcctaaannnnnnnnnnnnnnnnnnnntcttaatgagtgttctattgctgtgaagaaacaccttgaccatgccagcttttataaaggaaagcatttaattgggaatagcttgcagtttcagaggtttatttcattctcatcattgtgggtagcatagcagcatgcaggtacacatggtactggagatatagttgagagatctacagacagatccatgcataacaggaagaaagagactctgaacttgaaataggcttttgaaatcacaaatccttccttcagttgcacacttcctcaaacaagatcatgccttctaatccttctcaagtaatgccactccctaacgactaagtattcaaatatattagtctataaaaggtattcttattcaaggcttttagccttatcataatgtaaaatgcattcagtcctacttcaaaagtctcc

SEQ ID NO: 1060 - DNA, 943 bp, Mus musculus
  MOR110-8
atgaaaaataagtcaatggaacttgactttattcttttgggattgacagatgacccacaactgcaaattgtggtttttctgtttctctttctcaattatgtgatgagcctggtggggaacttaatcattgtgcttctcaccctgctggaccctcgcctcaaaactccaatgtatttctttctccgtaatttctcctttttggaaatcatgttcacaacagtgtgtattcccagattcttgacgaccattgtgactggagacaaaactattacttataataattgtgcagctcagttgtttttcattcttttgctgggagtcacagaattttatctcctggctgccatgtcctatgaccgctatgttgccatctgcagaccactgcactaccctatcatcatgaacagcaaagtgtgccaccaactcgtcctcagctcctgggtgactggattcttgatcatctttcccccattggccatgggtttgaagctggatttctgtgattccaggataattgatcatttcatgtgtgaaacttctcctattttacagatctcctgcacagacactcatgttctagaaatgatgtcctttgtcttagcagtggtgacacttgtagtcacactggtactagtgagtctctcttactctttcatcattaagactattatgagtttcccttctgcacagcaaagaaccaaagccttctccacctgcacttcccacatgtttgttgtctccataacatatgggaagttgtatcttcatgtatattaaaccatctgcaagggagagagtgtctgtgtctaaaggtgtagctctgctgtatacttcaatcgccccctctcctgaaccccttctttatacactaagaaaccagcaggtgaaagaagtcttctgggatgtattacaaaagactttgggcttttcaaaacacaaagtt

SEQ ID NO: 1061 - DNA, 663 bp, Mus musculus
  MOR224-8
tcctatgcaggttgtgtgtcccagctggtcttctatcatttcctgggtggtactgagtgtttcctgtacacagtgatggcttatgaccgttttgttgccatatgctaccctctacgctactcagtcataatgagtcatagaatttgtgccttcctggccatggggacagcagttttcggctgtattcattccacctttctaactactctcaccttccagttgccctactgtggccccaaagatgtgaactattacttctgtgatattcctgtggtgatgaagctggcttgtgcagacacatcgaccctggagatggtagggttcatcagtgtgggtctcatgcccctcagttgcttcttcttcatcctcacctcctacagctgtatagttcggtccatcctacagatccgctccactgagggtcgacatagagccttctccacctgcagtgcccattttactgccattttgctcttttacatgccagtgattttcatttatctaaggccaacaccaagtccttggttggatgcaactgttcagattctgaacaatctggtcacccctatgctaaatccgttaatttacagtcttaggaataaggaggtgaaatcatcactgtggactgtcctacatctgctgtgcttccttcccaagcatttg

SEQ ID NO: 1062 - DNA, 597 bp, Mus musculus
  MOR267-11
atccttctcactttgatggggtatgaccgatttctggctatctgcaaccccctcagatatcctcttctaatgaccaatgttgcatgtggacaacttgtggcctctgcttgggttggaggcttctttatttctctcattgagacaacactgatattcagggtgtctttctgcatacctaacctcatcagacacttcttctgccatatgagggcagttctgaggctgtcctgcacagacagtaacttcacagaattcattgtaacactgatgtcagtgtctggtttgctgggtacattcttgctcatcctcctgacttatgtgttcatcctttcttctgtcctcaagatcccttcagctgagggtaaacaaaaggcattttccacctgtgcctcacacctcactgtggtcctcatccactttggttttgcatctgttgtttatatgaagccagaaaactccggaggagatgacacactcatagcagttccatataccgtcattaccccattcctcagtccaatcatattcacactcaggaataaggatatgaagaatgctttcagaaagatcatgagaaagacagtagtcttgaaaaaa

SEQ ID NO: 1063 - DNA, 551 bp, Mus musculus
  MOR231-17P
agggtatgtattctcttcttggtgatggcctgggcgggaggtcttgcacatgcttttgtttcaagttctcgctgtatataattttccattctgtggtcccaatatcattgaccactttggctgtgacatatacccactattactacttgcatgtactgatacatacttcccttggcctttctatcattggcaataatggggcaatgtgcatagtcatcttcactctcctcctactctcctatgggataatccttagatttctcaagaatcacagtcaggaagggaggcgcaaagctctgtccacctgtggctcccatatcactgtggtttttctcttttttgttccatgtattttcatgtatgttagacctgtttctagttttcctattgataaattcatcactgtaatttataccattgttactcccatgttgaatcctttaatatatactttgagaaattcagaaatgaaaaattctatggaaaagctcctgcagaaaacattaagtccaagtagaatacggctgtcttcttgctgcttatgttactaa

SEQ ID NO: 1064 - DNA, 462 bp, Mus musculus
  MOR114-10P
accctgataatttctatcaatataattgactctaatatcattgatcattttggatgtgatgtaaaccctcttctgaaaatatcgtgctcagacaagtggttaattgagcagatggtaatatgctcggcagtattgaccttcatcattactcttctatgtgcagtcttttcatacatgtacatcataaggacagttctaaaattcccttctgcccaacaaaagagaaaggccttttctacctgctcttcacacatgattgtggtttccatcacctatggcagttgcatcttcatttacatcaaaccatctgcaaaagaagaagtgaccattaataaatgtttgtccgggcttatttcttccatatcacccatgctgaatcctttcatatatactctaaggaacaagcaagttaaacaagcttctcaggacttaattaagaaaattgcatttctcttaaagaag

SEQ ID NO: 1065 - DNA, 401 bp, Mus musculus
  MOR274-3P
acatcactctatgaaacccttgaatgtatgcatgctgtgtgctgatgctactaatcccaatatccttcatctcagtctcctatacacggatcctcatcactgtctaccacatgagctctgctgagggccgacggaaagccttcaccacgtgttcctcccacattatagtagtgagcattttttatggggcagctttctataccaatgtactgccccattcttaccacacacctgagaaagataaggttgtctcagccttttataccattctcactcctatgttgaacccactcatttacagtttgaggaatagagatgtggctgtggctctaagaaaagtcctaaggaaatatgcttcctctcagagattacgagtgagacacatacctgagaaatactag

SEQ ID NO: 1066 - DNA, 693 bp, Mus musculus
  MOR40-10P
caggtcctgcttatcttctggttcaacatgaaacccatcagctttgtgggctgcttcctgcagatgtttgtcatgaataccttccttcctatggaatcctctacctttctggtcatggcctatgatcgctatgtggctatctgccatcctttgtggttcctatccatcatcaaaaaacagtttgtcattaatgcaggcatttttattgttgtccgcaatcttctagctacactgcccactccagttctggctgctagactcaattactgtgccagcaatgtggtggagaactgcatatgtgccaatatttctgtagcaaaactttcctgtggggacattcgcctaaataagctctatcaatttgtgagtgtttggtgcctactaggttctgatctggtcctcattttgctctcttactgcttcatcttgagggttgttatgtgtcagcagtctggaggcactgtcaccaaggccttgagtacttgtggttcacatctcatccttatactcttcttctatactttgttgctagtctttatcttcacaaacaaggcaggaaagaagataccgtcagaggtaccaattcttcttaatgtgctgcatcatctcatcccacctgccctcaatcccattgtgtatggagtacgaacccaggaaatcaagcaggggattatcaagctattcaaacactag

SEQ ID NO: 1067 - DNA, 937 bp, Mus musculus
  MOR245-18
atgaatgaagcaaattactcagaagtatctgaatttatattcctgggactatcaacctacagaccaacacaatattttctctttgcttttgctataatatcatatgcagcaacatttctcggaaatttctcagttgtgtttatagtgatctttgaccctcatttacattcacccatgtacttccttttagctaatctttcattcgttgacttttgtttttctacctcaacagttcctaagttgatttctgacctgtactcaggtcacagtatcatttcaatccagagctgcatcttccagatgtttgtcctccatctactggggggatgtgagatggtgttgctggtagccatggcctgggacagatatgtggccatatgcaaacccctctactacctgaccatcatgaacccacggatgtgtcttttgcttttgattagtgcctggattattggtctcattcattcagtggctcaattagcttttgttgtccatttgcctttttgtgcttctaatgagatagatagcttttactgtgatcttcctcgattcatcaaaatggcctgtataaacacctacagaatggagttcttggttactgctgacagtggatttatttctctcagtaccttctttttattgattatctcttacatcttcatactgtttattgtacggaaacagtccttgggcagtttgtccaaggccttctctacactttctgctcacatttgtgtggtagttttgttctttggaccatgcatctttgtgtacatatggccatttcctactgtgccagtgggataagttcctggccattttggacttcatgattatacccatcctgaaccctgccatttatacactgaggaacaaagacatgaaggtggcaatgagaagactgagtgttcaactcctgagtaggaaaagtatctgc

SEQ ID NO: 1068 - DNA, 684 bp, Mus musculus
  MOR248-14P
atggaagactctaatcaaactgtggtttctgagtttatttttccagggactgtgtacctcaaaggcaacttgagatctttctcttattaccattttctgtcctctatctggtgactttggtaggaaacctctttgtagtgatattgatcatcattgatcatcatctccattctcccatgtacttcctgttagctaatctatcatttgttgacttctgcctttcctcagtaaatacacccaaactgaccatagatctcctaaaagaaaataaaaccatttcctttggcggctgcatgagccagatcctctgtgtgcatttctttggaggaagtgagatggtgcttcttgtaacaatggcctatgaccggtatgtggccatctgcaggccactccactacagcagcatcatggacagacagaagtgcatctggctcgttgtgatatcatggattgttggatttgtgcatgccattagtcagttgctcttgattttggatctaccattctgtggacctagagtgatagacagctttttctgtgatattcctttggtgatgaaattagcctgcatgaatactgatactctggaaatcctaataaatgctgacagtggcattttagcaacttacttgtttcactctcttactgatatcttatacttatattctattaactgttcaacat

SEQ ID NO: 1069 - DNA, 813 bp, Mus musculus
  MOR264-16P
atggctatcattggagaagaaaatatgactcaaatttcagaaattattcttttgggttttggagatctccatggccttcagtttcttctttttgggctatttctagccatttatgttatgactctcctgggtaacattgtaattctcaccgtagtatccactgattgctcccttcacacacccatgtatttctttcttggccacttctccttcctagagatcagctacaccacaacaattgagcctgtaatgctgtggacattgttatcggctcatgtgcctatctccttgccagcctgtgcttgtcagttttacttttttgcatctttggtggcaacagaatgcttcctccttgctgtaatgtcttatgatagatacatagccatttgtaacccactacactattccagtatcatggactcctggggttgtttccagctagcattggcctcttggttggctggatttctggcacctatcttactcatgatcttgatttttcgcttaacattttgttctgccaatgagattgaccacttcttctgtgatttgaagcccatcatgaaactggcctgcactaatactcaagtagctgaaatgacttcttttatatgtacctcattattcgctcttggtcccttcatactgaccttggcttcctatattcacatcatttgcaccattctgaggatcccttcgaccacagggaagcagagggctttctccacctgttcatctcaccttatagtggtcagtctttattatgggactctgggcattgtctatggcttcccatcaatgcctcaatatgaa

SEQ ID NO: 1070 - DNA, 402 bp, Mus musculus
  MOR34-9
aagttgccctgtggcaatgtcaaggtgaatgccatttatggtctaatggttgctctcttgattgggggttttgacatcctgtgtatcacaatctcctatatcatgattctgagggcagtggtcagcttatcatcagcagatgctaggcagaaggccttcagcacctgcactgcccacatctgtgccattgttttctcctatagcccaaccttcttgtccttcttttcccaccactttggggggcacacaatccctccatcttgccacatcattgtggctaatatttatctgcttttgcctcccactatgaaccctgttgtctatggagtgaaaaccaaacagatacaagactgtgtcataaggattttttcagagtctaaggattccaaagctcacggtata

SEQ ID NO: 1071 - DNA, 378 bp, Mus musculus
  MOR256-42P
ttggcctgccaggacacaggaaggaacagagggccaagatgtttgtggccagagcccataatcttggtcttccctgcaacattaattcttggctcctatggacacattggctaaagcagtactaaagggtcaagtcaacagctggacgcagaaaaagcttttgggacatgtgggtcccaccttctggtggtttccctgttttatggctcagccatttacacatacttgcaacccaagagcagttattctgagagtgatggaaaatttgtggcccttttttatactattgtcacccccatgctcaaccctctgatctataccctgaggaacaaggatgtgaagggggctctgtggaaggtgctagggagaggcacagac

SEQ ID NO: 1072 - DNA, 774 bp, Mus musculus
  MOR232-8
tggacttcgggcctccgcacgcccatgtacttcttcctgcgccaactggcgctggtagagatctgcttctcactggacgtggcaccccgcctgctggtgaccctgctgcagcctggacgtggggtgtcccccacgagctgtgccctgcagctgctccttgtgctgtcctgtgtcacatctgagtgcttccttctcatggtcatggcctgggatcgctttctggccatctgcaggccactgcgctatggcgccatcatgagcccgcagctgtgctacctgctagctactacctgctggctggcgggaatccctgtggcactcgtcttcaccatctggctctttaacttccccttctgtgggccacgtggcatccgacacttcttttgtgacatagcacctctgctgagcctggtgtgtgcagacaccagagttttcgaggccaatgtgtttgtggccaccgtcctcgtcatcatggttcccttctgtctcatagccacatcctatgtgatgattctggttgctgtccttaggatgccatcggcctctgggcgccacaaggccctgtccacctgcgcctcccatctcatagtggtaattctgttctatggcacaacaggggtcatccacttgcgccccaaggccagctactctccagagagcaagcaagtggtgtcgctgtcatacaccatggtgacccctatgcttaaccccctcatctacagcctgcggaacaaggaggtcaaggctgcctttgggcgtgtatgctgtggacgc

SEQ ID NO: 1073 - DNA, 704 bp, Mus musculus
  MOR23-3P
ccccaaatgttggccatattttggttagggcttattcctggcctttgatgcctgcctagcccagctcttcttcatccatatcctgcagggcatggagtctggcattctgttggcaatggcttttgatcgatacattgcaatctgtgatcctctgaggcacacatccattcttaaaccttcaattcttggtcggatgatagtggtggtggtaattcaagcggtagtgcttgtaggcctgttacctattctaataaaaagactgcaccattttcaatccattcaaattgcccactcttactgtgaacacatgactgttgtgaagcttgcagcaaaccgtgtgcaggtcaataagatatgtggtctctttgtgggggttgagcgttctgggatttgacatgttttttatcctcatatcatatgccctgattttctaagctgtttttcaccttaaacagaaggaggcaaggctcaaagcctttaacacctgcacagctcatatttttgtttttttagagttctatattcttgcctttttctcctttttaagccaccgtcttggtcatgttgttccctccacccacattcttctgtcaaccatctacctcctcttgcctcctgctctcaaccctattgtctatggagtgaaaagcatggtcatttaaaaacgggtggcacagatcttttttctagatcatgcacatcag

SEQ ID NO: 1074 - DNA, 544 bp, Mus musculus
  MOR23-4P
atgctgagctccctgaaaaccaataacgtgacatatctgaaccctggaactgtaatattgattggaattcctggactagagcacgtgcagttttggattggatttccattctttacagtgtgtctggtggctcttttgggaaatatcattttattaatcatcatcccagccgagcatagcttacaccaacccatgtacatcttcctggctgtgctggcagctacagacataggactttgtgcagccattgcccccaaaatgttggccatattttggttcagggcttattccatggcctttgatgcctgcctagcccaactcttcttcatccatacccttcagggcatggagtccggcattctgttggcaatggcttttgatcgatacattgcaatctgtgatcctctgaggcacacatctattcttacaccctcaattacttggtcggatgatagtggtggtggtaattcgagcggtagtgcttgtaggcctgttacctattgtaataaaaagactgcaccattttcggtccattcaaattgcc

SEQ ID NO: 1075 - DNA, 939 bp, Mus musculus
  MOR190-3P
atagagaagcacaacctcacaatggtgactgaattcatcctggtgggcatcactgaccaccctgagctgcaggccccattgtttggactgttcctcctcatctatctgatctctctgattggcaacttgggcatgatcatctttaccatggtgaattccaggctgaaaacacccatgtacttctttctaagacacctcgctactactgtccttggttattcaacagccgtgggaccaaaaatgttacaaaattttcttgtagatcaaaatacaatatcatttcatctttgtgcgatccagttgtctttctttagtatgttcattgcttgtgaaatttatattctgtctgcaatgtcctatgaccactatgtggctatctgtaagcctctgttctatatggtcatcatgtcaaaaagactatgctgggtgcttgtagtaatcccttatgtctactgtacaattgtggcacttttaatcacaattaagattttcactttgtctttctgtggctccaatgtcatcagtcatttctactgtgacagtcttcctttgttatctttggtctgctcaaatacacaagaaattgaggtggtgttgttgtacttatcagcttttaatttgatttcctctcttctgcttgttcttgtgtcctacctgctcattctcatagctattctcaggatgaactctgctgagggcaggcgcaaggctttctccacctgagggtcccacctgacaatggtcactgtcttctatgggactttgatatttatgtatatgcagcccaaatctaatcattcctttgatactgataaagtggcttcaatattttataccatggttatccccatgtttaatcccctgatctacagcttgagaaataaagatgtaaaagatgctctccttaggacatggaaaaaaaaatacatggttttcttt

SEQ ID NO: 1076 - DNA, 941 bp, Mus musculus
  MOR187-4
atggggcaacagaatacaacatcactgcctgggttcatcttgatgggaatcacacagcgcactgagcttcagcttcctttgtttggggccttcttcatcatctatgcagtcacagtcatgggcaacctgggtatgatcattttgactaagctggactctcacctagaaacccctatgtactttttcatcagacatctggcttttattgatcttggaaattccactgtcatctgtcccaagatgctggtggattttgttatgaatgacaaaaccatttctttctgtgaatgtgctacccagttgtcctttcttcccttatgtttattatcactgaattttttatcttgtctgcaatggcctatgaccgctatgtggccatctgcaaccctctgctctacagtgtgatcatgtctcagagactttgtcatgtgcttgtgggcatcccgtacctctacagcaccgtccaggctctactggtcaccagtaggattttcacatcaactttctgtggctctaacatcatcagtcatttctactgtgatggtattttcttgttacctatgttgtgttcaaatgctgaagaaatacaattggtgatcatttcattttcagcattgaatttgatctcttcttttctggtagtccttggatcatatgttctgattctgatagccatatgtcgaatgcattctgcagaaggcaggagaaaagctttctctacatgtgggtctcatttgacagtggttgtggttttctatggtactctattttttatgtatttgcaacctaaatctactgactccttagagaatgataaaatagcctcagtgttttatactttagtgatccccatgcttaaccccttgatatacagtttaaggaacaaagaggttaaaaatgccttctacagggtactaaagggtcaatttaaaattaacact

SEQ ID NO: 1077 - DNA, 916 bp, Mus musculus
  MOR182-9
atggaactgaacaggacccagctgactgaatttgttctcagaggaataacagatcgttcagagctgcaagtccccctgttcctggtgttctttctcatctatgttatcaccatggtgggcaaccttggcttaatctttgtcatctggaaggaccctcatcttcacacacccatgtaccttttccttggaaatttggcctttgctgatgcctgtaattcatcctctgtgacaccaaagatgcttatgaaatttttaaataagaatgacatgatatccatgggtgagtgttttgctcaattttatttcttttgttcaagtgtaactgcagaagccttcattctggtagctatggcctatgaccgctatgtagccatatgcaaacctctgctctatgtagtggtgatgtccaacagactctgtattcagttcataggtgtatcctatctaattggacttctacatggtcttacttcatgtaggattgttatttaggttaacgttttgtagttccaatgtaatagatcatttctactgtgacatcctgccactttataggatttcttgcactgacccatcgatcaatgtactggtagctttcattatgggtattttaatacaagtgagtacctttatgagtattatagtctcctatgtccgtgtcctctttgccatcctgagaacaaagtctgagaggggcagaaacaaagccttctctacttgcagttcccacctgtcatctgtgtctttgttctatggcactctcttcatcatatatgtcctctctggctctgacacagataattatcagggtaaaatgtattcactgttctataccattatcattcctctgctaaaccccttcatttacagcctcagaaacaaagaagtcatcggtgccttgagaaaactcagagaa

SEQ ID NO: 1078 - DNA, 816 bp, Mus musculus
  MOR183-7P
atggaaatggacaacacaacactgctcattcagtttgttctctcaggacttgttcatctgccccagtggaaaatccccctgttcctgctgttcttggtcatctatctcatcaccattgtgggcaaccttggtctgatcactctcatctggaatgatcctcaccttcacattcctatgtacttttttcttgggagtttagcatttgtggatacttggttatcatccacagtgacaccaaagatgctacaagacatttttgccaagaataaaatgatatctttctctgagtgcatgatacagtttttttcatttggaatcagtgcaaccacggaatgttttcttttggcatcaatggcctatgatcgctatgtagccatatgcaaacctttactctacccagtgatcatgacaaatagactctgtgtacgtcttttaacattgtcctttgtaggtggattcattcatgctttaattcatgaaggctttttattcagattaattttctgtagctctcacataatagaccacttttattgtgatgttatgccactgttaaagatttcctgtaatgacccttctatcaattacctgatgctctttattttctctggctcaattcaggtattcacaattacaactatccttgtctcttatacacttgttctgttttctatcctaaagcagaaatctctcaaaagcataaagaaagccttttccacctgtggagcccatctcctctctgtttctttgtactatggccctctgctcttcatgtatgtgcgccctgcatctccacaagtaaatgatgaagatatg

SEQ ID NO: 1079 - DNA, 468 bp, Mus musculus
  MOR135-24
ctgatgcatactctccttgcagcaagattgtctttttgtgagaacaatgtgatcctcaattttttctgtgacctatttgttctcctaaagctggcttgctcagacacttatgttaatgagttgatgatatttataatgagttccctcctcattgttattccatttttcctcattgtcatgtcttatgcaaggatcattgcctccattcttaaggttccatctattcaagggatctacaaggtcttctccacctgtggttcccatctgtctgtggtgaccttgttttatgggacaattattggtctctacttatgtccatcaggtaataattccacagtaaaggggactgtcatggccatgatgtacacagtggtgactcccatgctgaaccccttcatctatagcctgaggaacagagacatgaagagggccctaataagagttatttgcagtaagaaaatctctctg

SEQ ID NO: 1080 - DNA, 457 bp, Mus musculus
  MOR256-43P
atggactatttgaacaccagttcagaagagggcttcattttagtgggcttctcagactggcctcatctagaacccatcctttttgctttcatttctatgttctactctctgactctctttggcaacaccgtgatcatcattctgtctcaactggacctccgcctgcacacacccatgtactacttcctctgccacctctccttcctggacctctgctacactgccagcactgtgccccagcttctggtcaacctctctggacttgacaggaccatcagctttggaaggtgtgtggcccagctcttcataatgctctcactgggaggcattgagtgtgtgcttttggtggcaatggctatagatcgctatgctgctgtgtgtcgcccactccactacacaaccattatgcaccctgttactctgcagagcattggttgtattctcctgggtagggggc

SEQ ID NO: 1081 - DNA, 576 bp, Mus musculus
  MOR162-11P
atggctttaagaaatgcctcttcagtgaaagaatttatcttgctgggattgacacagcagccagggctccagctgccgctcttcttcctgttcttgggaatctatgtggtctccatgttggggaacctgggcttgattgttctgattgtgttgaatcctcacctgcacacccccatgtactactttctcttcaacctttccttcatagatctctgctactcctctgtcataacccctagaatgttggtgggttttgtgaagcagaacatcatctctcatgctgagtgcttgactcagctttttttctttgccttctttgttattgatgaatgctacattttgacagcaatggcttatgacagatatgctgccatttgtaagcccctgctttaccaggtcaccatgtctcatcaggtctgcctattgatgactatgggtgtgtatgtgatgggctttggcaggtgccttgtcccacatagtttgcatgctgagactcaccttctgtggatggtaacatcattaatcactatgtttggcgatgtacttcctctccttaaactctcctgcacaagtacc

SEQ ID NO: 1082 - DNA, 633 bp, Mus musculus
  MOR256-44P
atgaaatatttgaacaccagttcagaagatggcttcattttagtgggcttctcagactggcctcacgtagaacccatcctttttgctatcatttctattttctcctctctgactctctttggcaatactgtgatcaccattctgtcttgactggacctccacctgcacacacccatgtactgcttcctctgccacctctccttcctggacctctgctataccgccagcactgtgccccagcttctggtcaacctctctggacttgacaggaccatcagctttggaaagtgtgtggcccagctctgcatagtgctctcactgggaggaactgagtgtgtgcttttggtgacaatggctatagattgctatgctgctgtgtgtcgcccactccactacacaaccattatgcaccctgttctctgcagagcattggttgtattctcctgggtggggggccttgtgaactctctgatccagacaagccttgtgatggccatgcctctgtgtggacatcaactgaatcacttcttctgtgagctacctgttctcctgaagatggcctgtgaggacacaggaggaacagaggtcaattcgtttgtggcccgggtcataatcttagtgtgtcctttactg

SEQ ID NO: 1083 - DNA, 531 bp, Mus musculus
  MOR192-2
tctcataaagtatgttggcttctagtcacaatgacctatctttactgtacatttatgtcccttgtagtcaccataaatattttctctttatccttctgtggctacaatgtcatcaaccatttcttttgtgattgtattcccttaatatcattgctttgctcaaatacacaagaagttgaacttatagttatgttctttgcagcttttgatttgatttcttcccttgtcgtcgtgctgatgtactacctgctcattttcatagctgttctcaggatgaactctgctgagggcagacgcaaagctttctctacctgtgggtcccacctgacagtggttacattattctatgggacactgatatttatgtatgtaaaacctgtatctagtcattcaattgatactgaaaaaatatcatctatactttatactctaatcatccctttattgaatcccctggtctacagtctgaggaacaaagatgtgaaagaagctttacaaagaacatgtcaaaaaatattcaacacattttct

SEQ ID NO: 1084 - DNA, 387 bp, Mus musculus
  MOR185-8
cttaaccagctgtctcaactcacatgttcagacagcttttcaagccaactcataatgaatcttgtacctgttctattggcagtcatttccttcagtagtatcctttactcttatttcaagatagtgtcctccatatgttctatctcctcagttcaagggaagtacaaggcattttctacatgtgtctctcacctttccattgtctccttattttatagtacaggccttggagtgtatgtcagttctgttgtgatccaaagctctcactctgctgcaagagcctctgtgatgtatactgtggtcaccccgatgctgaacccctttatttatagtctaaggaataaagatgtgaagaaagctgtggaaagactattagaaggaaaactg

SEQ ID NO: 1085 - DNA, 508 bp, Mus musculus
  MOR211-6P
atggccaagaataatgctaccaccataaatggattcatactaatgggctttagtgaccaccccaagtgagagattccactattgctggtatttcttagcttttatcttgtcaccatgctgggaaacttaggcatggtcatttttatccatgtagatgtccaactccacatcccaatgtacttctttctgagccatctctctgtgttggatgcctgctatacttcagtcatcacccctcagatactggcaacgctggctacaggtaaaacagtcatttcctatggttgttgtgctacccagttcttcttcttcactatctatgcaggtacagagtgtttccacaaacaccttctctctctcattctgtgaaaatcagatcaattttttttttcttttatgacctcccacctctgctgaagctggcctgtagtgacacaattaaatggttgaaattatcattgttttctttgggaattttgtaattttggccaattattgcgtcccgctc

SEQ ID NO: 1086 - DNA, 327 bp, Mus musculus
  MOR211-7P
ctcgtactggctttccacagccaataccgtagtcatctcattctctacctcctcatcatcagagttgtcatgagaatgaagtcttcaggtagaagagcaaagactttctcaacatgtgtctcccacctcactgctgtggctcttttttggggacacttggctttatgtacatacggagtggttcaagaagataaaggtatgtctgtcttctacactgtggtcattcccatgctgaacccactaatctacagcctaagaaacaaggatgtcaaggctgcattcaagaaaattactggtaaatgtcagttttcccacagcacacaacac

SEQ ID NO: 1087 - DNA, 582 bp, Mus musculus
  MOR105-9
aggtatgttgccatctgtaccccacttcgctatgcaatcattataactccaaagctctgcacacagctttccacaggctctttcaccctcggcttcctcatgctcctcccagagattgtttggatatctactctgcccttctgtggccccaatcagattcaccagctcttctgtgacttagaacctatgctcctcttggcatgtacagacacatctatgattctggttgaagatgtcatccatgctatctccatcctgagctgtgtctctatcatcagcctttcctatttaagaatcattaccgtagtcctgaagattccatctggtgagagtcgtcagaaggcattctccacatgcacagcccacatcaccatttttgtgctgttttttggcagtgtggctcttatgtacctgcgcttctctgtcaccttccaaccactactggagaaggtcattgcactaatgtttgctgtccttgccccatttttcaatcctataatctacagcctgaggaacaaggatatgaaagatgccattaagaaaatgtttggttctcaaaagatactcactgtctctgggagc

SEQ ID NO: 1088 - DNA, 493 bp, Mus musculus
  MOR218-6P
atgactgcaagaaacatgacaacaatgagtggattcctcctcgtggggttctctgacaaccatgagctgcagatcttacaggctttgctcttcttggtgacatacctattgggctcagcagggaacttcattattatcaccatcacaacactggatccacagctccagtctccaatgtattactttctgaagcacctttccattctggacctctcatccctctctgtcacaattccccagtatgttgacagttccctggcacgaagtggctacatttcatatgcacagtgcatgcttcagatttttttctttgcatcttttgcctggggagagctgggcactctcacagtgatgtcttatgaccgctatgtggccatctgcctcccactgcactatgaggtcataatgagtcccagaaagtgcacttgggctgtggcagctgtgtggctaagtgggaggtatctcaggaacattattcacagcaagtacactc

SEQ ID NO: 1089 - DNA, 318 bp, Mus musculus
  MOR253-13P
ctttatggaggcatcaattttttacttaccttgctatcctatggctgcatcattgccagcatcctgcacatgcgttctgctgagggcaagaggaaggccttttctacctgctcatcccacctcatcgtggtttctgtgtactactcatctctgttctgtgcctatatcagtcctgcttccagctacagcccagaaagaagcaaatttacctcatttttttactcagtcctcagtccaaccctcaaccccctcatctatacactgaggaacaaggatgtcaagcttgccctgagaagactcttgccctctttatcaaat

SEQ ID NO: 1090 - DNA, 904 bp, Mus musculus
  MOR267-12P
gagaaaaaaaaccacacagtggtaagtgagtttcttttccaaggtttctccagctttcaggaatacaagtttactctctttatggtatttctgaccttgtacctgctaactctgaccagcaatgccattattatgataattatcggtattgagtgtcaccgtcatactcccatgtacttctttcttagtatgatttccacttcagagacagtgtacacattggtcattgtaccaagcatgctcgccagccttgtgggttcaagccaatccatttctttggctggctgtgctacccagatgttcgtttttatcactttggccatcaacaactgctttctgcttacagcgatgggatatgaccgctatgtagctatctgcaaccccttgaggtcctcagttatcatgaacaagagggtgtgtgcccagctagtatggggttcctgcaatattgtcttcaaattgcatctgtattcagggcacctttctgtgacagagaagtagcccactatttctgtgcccggttatgaaactgtcctgtgctgataccactctgcatgacatagttaactttatcatcagctcactggttattgtggtacccatgggcttggttttcatctcttacattctcataatctccaccatcctcaagattgcctctgctgagggacggaagaaggcctttgccacctgtgcctcccacctcacggtggtcatcatccactatggctgtgcctccattgcctacctcaagcccaaatcagagaacaccagggatcaggaccagctgatctcagtaacttacactgtgtttaaccctctcctcaaccctgtggtgtataccttgagaaacaaagaagtcaaggatgccatttaccgtgctattgggaaaaaaccttttgcc

SEQ ID NO: 1091 - DNA, 714 bp, Mus musculus
  MOR146-8P
atggaaccatataatttaacaggaaccttggaattcattctccttggactctcagaggaccctgaactgcagctcatcttatttgcactattcctgctcatatacatgctcactgtgcttggaaatgttctcatcatcttggccatcagctctgattcccacctccacagtccaatgtacttcttcctctacaacctttcattgtctgacatgggcttcagcagcaccaccatccccaaaatgctgataaacttgcatgcccataacagatccataacttatgctgaatgcctaactcaggtatctttcttttttctttttgggggtatggatagcctattgctggctgtgatggcctatgaccgatgggtagctatttgtcaccctctatactaccaagtcattctaagcccttgcctctgtagatgtttggtcatagtttcccttttcattagtcttgtgagttcacaggtacactgcttattggtatcacaactgacattttgtattaacgtagaaatccctcatttcttttgtgatgttccagaacttgtaaaacttgcttgttctaacactactatcagtgacatagtcatatttcttttaggcatcattcttggtttcctccctgcctcaggaatattttactcctactataaaattacttcttctatttttagagttccatcactgttagggaaatataaagccttc

SEQ ID NO: 1092 - DNA, 874 bp, Mus musculus
  variation (556)...(624): Any nucleotide A, C, G or T
  MOR256-45P
atgagaggtgacaaccacagctgcttctgggacaccccaaaggactttatcctcctgggcatttccgacaggccatggctggagctcccagtctttgcagtcctcctggtgttctacattctggctatgctggggaacatctctatcatcctggtatcccagctggatccccagctccacagccccatgtacatattcctcagccacttgtccttcctggatctctgctacaccaccaccactgtccctcagatgctgttcaacatggggagctcccagaagaccatcagttacggtggctgcacggtgcaatacgccattttccactggctgggctgcaccgagtgcgttgtcttggcggccatggctctggaccgctacgtggccatctgtgagccactccggtatgctatcatcatgcaccgcccactctgccagcagctcgtggctatggcctggctcagcggcttcggcaactcccttgttcaggtcatcctgacagtgcaattgcctttctgtggccggcaggtgctgaacaacttcttctgcgaggtgnnnnnnnnnnnnnnnnnnnnnnnnnnnnnnnnnnnnnnnnnnnnnnnnnnnnnnnnnnnnnnnnnnnnngggacggcacaaggccttcgggacttgctcttcccacctgttggtggtctccctcttctacctgcccgccatttacatgtacctgcagccgccatccagttactcacaggagcagggcaagttcatctccctcttctattctataatcacccccacccttaaccctttcatctacaccttgaggaataaggacgtgaagggagctctccgaagactcctggcaaggaccggaaggctgtgtggaaggtga

SEQ ID NO: 1093 - DNA, 752 bp, Mus musculus
  MOR202-32P
ctgtcatttatagatatatgctattcttcttctatcagcccaaggatactttcagacttcttaaaaacagagaaaacaatttccttcattgcttgtgccactcagaattttgttttggcttggatgggtgcatctgagtgctgcttgctggctgccatggcctatgacaggtatgtggccattggtagccctctgcagtactcagccatcatggctcccagtctttgctggaggatggttgctggtgtctatgggagtggattctttattagctttgttcaacagttgcttgttttaatctctactattgtgggccaaatgtcattcgtcatttcttctgtgacattcctcagatcattcccttgtcttgctctgatcccttcatcagccagctggttcttttcctggcagctctttttgttgggtttggctctttccttgttattatcttctcctatgtattcattgcagtttccatcctgaaagtggcctcattcgaaggccgtgtcaaagcattcaagacatgtggctcccacctggcagcagtgactctcttctatggcacaggcctctctgtgtacatgcaccacagctctcagcactctacaaagcaagacaaggtgctgtctgtggtctacaccatcctcatccccatggtaaaccctctgatctacagtctgaggaacacagagatcaaggaggccctcaagagagtgctgaagaaggcagcacatttacctcagaaagcatag

SEQ ID NO: 1094 - DNA, 902 bp, Mus musculus
  MOR115-3P
atgtggccaagtgtcattgctatatatttgtttggctgggactcacaagtgagcagggacttcaaaacagttttcctatttccagtcctcacatacatgctcagcattggggggaatcagaacaccgatgccttcacattgcatgagtcccacttccaggttcccatgcacttcgtcttcaggagcttctccttcctggaaatctccctcacatccacttttattcctcagctgctcttcagcgtctctacaggaattaagaccatcagctttgttggctgcttcattgccattttctttggaaccactgagatttggactctgacttctatgacctgtgattactacattgccacctcccaatccctacactatgccaccataatgagcaacagggtctgcactctgctgattccctgctcttgtctgagttgcttcctaatcatcttcttgcccatcatcctgaccagtcactggatttctgtgcatcaaatgtgctcaaacatcattgctgtgactatgggacccttatagaaatagcttgttctagcacaaggctgatggagctatttgctttttcttagtaatcatgaccttgagagtcgccatggtgctggagactctcctacatgtgcagcatcaggaccattccaaagatcccttctgcatagcagaggaagaaggcattttgttcttcccacacacttgtcatctccatctcttacagaagctgcatctttatgtgcataaagccttcatcaagaggagttgtcctcagcaaggggatggctgtcctcaatacctcagttgccccattactagacttattcatttacactttcagaaataaacagttgaaaaagagcttcaatgacattaccagaaagactgtaattcttcaa

SEQ ID NO: 1095 - DNA, 912 bp, Mus musculus
  MOR267-13
ttcactgaagtgatagagttcgtcttcctgggattctccagctttggaaagcatcagataaccctctttgtggttttcctaaccatctacattttaactctggctggcaacatcattatagtgacaatcacacacatagaccaccaccttcacactcccatgtacttctttctgagcatgttggcaagctcagagactgtgtacacactggtcattgtcccacgaatgctttccagcctgattttttacaaccttcccatatccttggcaggctgcgcaacccaaatgttcttttttgtcaccttggccaccaacaactgctttctgctcacagcaatgggttatgatcgttatgtggctatttgtaatcctctgagatatacaatcatcatgagcaagggaatgtgtgccttgttggtttgtgggtctttaggcactggcctggttatggcagttcttcatgtgccagccatgttccatttgcccttttgtggcacggtggtggagcactttttctgtgacatatacccagtaatgaagctttcttgtgttgataccactgtcaatgagataatcaattatggtgtaagttcatttgtaattcttgtgcccatagggctgatatttatctcctatgtgctcattgtctcttccatccttaaaattgtgtccactgaaggccagaagaaagcctttgccacctgtgcctctcatctcactgtggtcattgtccactatggctgtgcctccattgcctacctcaaacccaaatcagaaagttcagtagaaaaagaccttcttctctctgtgacctacactatcatcactcccttgctgaaccctgttgtctacagcctcaggaacaaagaagtcaaagatgctctatgcagagctgtgggcagaaacacttct

SEQ ID NO: 1096 - DNA, 480 bp, Mus musculus
  MOR188-7
attgtctcacttctagttaacataaagattttcactttatccttctgtggctacaatgtcatcaggcatttctactgtgatgccctccctttgttaactttggcctgctcaaacacacatgaaattgaggcgataattttaatcttctcagcttttaatttgctttcatctcttcttatagtaattggttcctatctacttatccttatggcaattctaaggattaactctgctgagggcaaatggaaggctttctctacgtgtgggtcccacctgacagttgtcatcgtcttttacgggactttgatatttatgtatttgcagcctacattcactcactccattgacactggtaaagtgatttccatcttttacacccaggttatccctatgttgaatcccttaacatacagcttgaggaacaaagatgtaaaagatgtccttaaaaaaccaatggaaaaagtgcacaatcttttctca

SEQ ID NO: 1097 - DNA, 346 bp, Mus musculus
  MOR256-46P
attttaatcttctcagcttttaatttgctttcatctcttcttatagtaattgggtcctatctacttatccttatgacaattctaaggattaactctgctaagggtaaatggaaggctttctctacctgtgggtcccacctgacagttgtcatcgtcttttatgggactttgatatttatgtatttgcaacctacatccactcactccattaacactgttaaagtgacttcccatcttttacacccaggttatccctatgttgaatcccttaatatacagcttgaggaacaaagatgtgaaagatgtccttaaaaaaacaaaggaaaaagtgtacaatcttgtctca

SEQ ID NO: 1098 - DNA, 726 bp, Mus musculus
  MOR171-41P
atggaggacatggcagcaggaaaccactgcacagtgactgagttcttcttagctgggctctcagagaagccagaactccagctgccactcttcctgctcttcacaggaatctatctgatcaccatggcagggaacctgggcatgatcacactgattgggctcagttctcatctgcacacacccatgtactatttcctcagcagtctgtccttcattgacttctgtcagtctacagttgtcattcctaaaatgctcgtgagctttctgacagagatgaacatcatttcctactctgaatgcatggctcagctctacttcttcctcacttttggtattgcagagtgctacacattagctgcaatggcctatgaccgatatgttgctatttgtaaccccttgctttacaatgtaaccatgtcctatcagatttacagttctctgatttcaggggtatatatttttgctgtgatctgttcatcctttaacactggcttcatgcttaggactcagttctgcaatttagatgtgattaaccactatttctgtgatcttcttcccctcttgaatcttgcatcctctaatacctacatcaatgaaatattgattctattttttgctacactgaattcatttgtcccagtgctgaccattattacttcctacatcttcattattgtcaccatcctctccattcactccagggagggcaagttcaaagcttttagt

SEQ ID NO: 1099 - DNA, 588 bp, Mus musculus
  MOR211-8P
atgtccaattccaccctggttaccgagttcatgctggaagattttgctgagaattgggagctcaggatccttctcagtgtgctgttcctgctggtgtacctgtacagcctgatagggaatcttatcatcatcattgctactacagttgaccagacactgaacacacccatgtacttcttcctcaggaatctatccattttagatatatgctacgtttctgtcactgtgcccaatgcttgtatcaactctctcactgaccacaggaatatttctgtaggtggatgtgcagcacagatcttttttgtctatatttgtgcatgtgtagagattctatttcttaccatcatggcccaggaccgctatgtggccatttgcaaacctctcctctatcctgtgatcatgaaccactggttctgtgttcagatgacactggcttccctacttagctcacttgtccttgcaagtgtgcacactttcaaaactttccagctgtccttctgtcactctaatgtggtccctcagttcttctgtgatattccttcattgctgaggctttacttgctactgatacctttaataacaaactcc

SEQ ID NO: 1100 - DNA, 532 bp, Mus musculus
  MOR189-5P
atggcgagtcacaactttacaatggtgactgaattcattctggtggccaacactgactgccctgagctgcaggtcccattgtttggactgttccccatcatctatctgatcatactggtgggcaacttgggcatgatcatccttaccatggtggattccaggctgcaaacacccatgtatttctttctcagacaccttgctactactattcaacagctgtgggaccaaaaatgttaagaaattttcttgtagaacaaaataaaaaattattttatgactgtgcattccagtcatctttcttcagttcattgttagtgaatttttttattctgtatgcaatattttatgactgctatgttgccatctgtaaaccactcaactataatgtcattatgtcacaaagactatgttggatacctggtggcagtcccatacctttacagtatatttgttgctctcatagtcaccataaatatttttccttcttccttgctgtggccccaacattatcaatcatttcttttataatggt

SEQ ID NO: 1101 - DNA, 645 bp, Mus musculus
  MOR245-19P
atgttttttgtggctagcatgatgggaaacagcctcatcgtgttcactgtggcatctgaccctcacttacactctcccatgtactttcttttggctaacctctctttcattgacttgggtgtttcttctgtttcttctccaaagatgctttatgacttattcagaaagcacaaagtcatctcctttacaggttgtgttactcaaatatttttcattcatgtcattggtggtgtggagatggtgctgctcatagccatggcctttgacagatatgtggccatatgtaagcctctccattacctgaccattatgagcccgaggacatgcatcttgttttcagtgactgcctgggtggttggccttatgcattctctgattcaactggcttttgtagtaaacttaccattttgtggaccaaatgtgttggacagcttctactgtgaccttcctcggtttatcaaactagcctgcatagacactaaccagctggaattcatggtcacagtcaacagtgggttcatctctgtgggttccttcttcatactgatcatttcatatattgttatcataatcagtgtgcaaaaacattcttcaggtggttcctctaaagccctgtctactctttctgctcacatcactgtagtg

SEQ ID NO: 1102 - DNA, 474 bp, Mus musculus
  MOR0-14P
atgccaagcagatctgtgctgggagatggaaaccacacctctgtggccatgtttgtcctcctggggctcttggaccaagctgagctgcagctcatcctttttcctgtcttcctagggacctacctcattactctgatttggaacctgggccttatcatcctcatcagaatggactctcacctacaaacacccatgtacttttttctcagtttcctgtcatttatagatatatgctattcttcttctatcagcccaaggatgctttcagacttcttaaaagcagagaaaacaatttccttcattgcttgtgccactcagtattttgttatggcctggatgggtgcatctgagtgctgcttgctggctgccatggcctatgacaggtatgtggccattggtagccctctgcagtactcagtcatcatggctcccagtctttgctggaggatggttgctggtgtctaccggagtgga

SEQ ID NO: 1103 - DNA, 417 bp, Mus musculus
  MOR0-15P
atgccaagcatatctgtgctgggagatggaaaccacacctctgtggccatgtttgtcctcctggggctcttggaccaagctgagctgcagctcatcctttttcctgtctttctagggacatacctcattactctgatttggaacctgggccttatcatcctcatcagaatggactctcacctacaaacacccatgtacttttttctcagtttcctgtcatttatagatatatgctattcttcttctatcagcccaaggatgctttcagacttcttaaaaacagagaaaacaatttccttcattgcttgtgccactcagaattttgttttggattggatgggtacatctgagtgctgcttgctgactgccatggcctatgacaggtatgtggccattggtagccctctgcagtactca

SEQ ID NO: 1104 - DNA, 473 bp, Mus musculus
  MOR190-4P
agaaccaaaaaccacacagtggtaactgaattcatcctgatgggcatcactgaccaccctgacctacagccctcattgtttggtttgtttcttctcatctatctgatatcactggtgggaaacttgggcatgattattcttacaatggtggactccaggctgcaaacacctatgtatttctttctcagacaactcgctactactgaccttggttattcaacagctgtgggacccaaaatgttaacaaattttattgttgatcaaaatagaatattctttaacctttgtactacacagttagccttctttcttctgttcattgcttgtgaactttttattctgtctgcaatgtcctatgaccgctatgtggctatctgtaagcctctgttctatatggtcatcatgtcaaaaagactatgctgggtgcttgtagtaatgcccttatgtctactgtacaattgtggctgctttta

SEQ ID NO: 1105 - DNA, 582 bp, Mus musculus
  MOR106-10
ttcctggcagtcatggcatttgatcgataccttgccatctgtaggccactacattatccttctctcatgactgggcgcctccgaaacacccttgtgaccagttgctgggtgcttggtttcctctggttccctgtacccatcatcatcatctcccagatgtccttctgtgggtccagaattatagaccacttcctgtgtgacccaggccctcttttggcccttgcctgttccagagtcccattgatagaggttttctggtccattataatgtctatgctcctggttattcctttcctcttcatcatgggaacttacatattggtcctaagagctgtgtttagacttccttcaagagaaggacaaaaaaaggctttctccacttgcgggtctcatctcacagtagtttcactcttttattgctcagtgatgataatgtatctgagcccaacatctgagcatgaggccggaatgcagaagcttgtaactctattttattctgtgggtacaccactgcttaatcctatgatatacagtctgaggaacaaagatatgaaaaatgccctacagaagattttgagaaca

SEQ ID NO: 1106 - DNA, 537 bp, Mus musculus
  MOR182-10P
ttcctactgtcagtgatggcctatgaccgctatgtggccatatgcaaccctttgctttatccagtaatgatgtccaatagcctctgtatgaaatttatacatgtttcatatattgtaggttttctacattcagcaattcatgtgggcttgttagtgagattaaatttctgcaagtccaacatcatacactatttctactgtgaaatcttgcagttattcaaaatttcctgcattaatcctacaatgaacgtccttctggttttaatattttcaactttgatacaaggtttgacttttatgacttttattgtctcctactcctctgtcatttttcccatcctgaaaacaaagtctgagaggggcagacgcaaagccttctccacctgcagtgctcacctgctctccgtgtctctgttctatggcacacttttcctcatgtatgtgcatcctgggtctggatcaggggaagataagggcagaatgtattctttattttacacaataataattctatttctaaatcctttttttattacg

SEQ ID NO: 1107 - DNA, 793 bp, Mus musculus
  MOR259-7P
acacacagctgcacactccccatgtacttcttcctctctaccctctccctgttggatatgagctatgtcaccaccatgccccagatgttggtgcatcttcttgctcactctcagaccatctcctttgctggctgctgcctgcagatgtatgtgttcggtgccctgggtatgactgagtgcaccttctttgttgtgatggcttatcaccggtatgtggccatttgctagccattgccctatactgtcatcctcaactggggcctgtgcatgcggttggcagcagggtcttggatctgtggtttcttttcatctttattacatactttcttcaccatgagtctgccatattgtgggcccaacagggtcaatcactacttgtgtgaaggtccttcagtgcgtagcttggtttgcatggatactcactttgtagagatggtggacttggtcttgagtgtctttttggttgttattccaatttccctcattgtggcctcctacattcatattgccatggcaattctcaagatcaagtccacagagggccgctgcaagtctttctctacctgtgcttccctcctgacatggttacactcttctatatttctgccacttacaactacatgaggcccaactccagctactctcctgaatgagaaagcagatctcactcttttacaatgcttttacacccttgctcaaccctgtggcctacagtctgagaaacaagaatataaagagggcatttctcaaagtgataagttatagcaggtgggccgggggaccaggatggtga

SEQ ID NO: 1108 - DNA, 676 bp, Mus musculus
  MOR203-7P
atggaacaaagtaatgacaccaaagtgactgaattcattcttctgggatttgctgggcagcacaagtcttggcacattctgttcataatatttctaatgatctatgttgtcacactcatgggtaacattggaatgatcgtactcatcaaaattgattcttctctccacactcccatgtactttttcctacaacatctagcctttgttgatctctgctatacctcagctattactcccaagatgttaaaaaacttcacagagacaaaagcttccatatctttcataggatgtatgttacagctactagcctatggtacttttgcaaccatcgactgtttcatcctagctgctatggctgtggaccgctacgtggccatctgtaacccattgcgctatcccatagtcatgtcccagagactgtgcattctgctgctggtgggttcttataccatgggcttcctaaatgcttctgtaaacacaagttttacattctcactgaaattctgcaaatccaatgccattaatcactttttctgcgatgagccacccattcttgccctatcatgctccagtattgacttcagtatcatgttactgacagtttttgtggggttcaacctagttgagtactgtgctggttgtcatcttttcttacatatatatcttgtctgccatc

SEQ ID NO: 1109 - DNA, 465 bp, Mus musculus
  MOR111-11
ctcatgctgtttctcaagttagatttttgtgcttcaaatgtcattgatcatttctgctgtgactacttccccatcttacagctctcctgctcagatacatggtttttagagacaatcggcttttactttgcatttattactctgctgttcacactggctctagtgatcttgtcatacatctgcatcatcaacaccattctgaggttcccatctgccagtcagaggaaaaaggctttctccacctgttcctctcacatgattgtcatctccatctcttatggcagctgcattttcatgtatgtcaaaccttctgcaaatgaaagagcatcactgaccaaaggggtggctcttctcaatacttcaattgctcccatgctgaacccttttatttacaccttgagaaatcaacaagtaaaacaagccttcaaggatttgattaataaactaatgtttaatagaaacaaa

SEQ ID NO: 1110 - DNA, 658 bp, Mus musculus
  MOR0-16P
gatttggcaataggacaatattgcatgttgcatgagttcattctgactgaattatctaagaagctagactctcagctgcctttttcctctacttttataggaacttatgcactcactctggtgggaatttgggcaggttcacattgaatcagtaaagtttccactgcacaaacccatgtactacttcttcagcaatatatactccattaatctctgccatcccatggttgttaacccaaaaatgtttgggaaatttgtgatagaaaacaaccccatctcccaccctcaatacatgactcagctctatttcatcctcagttttgtgactgcaaaatgccacttgttagcagcaatttcatatgaacctcatgttgctatatataatcctttggtttacaatgtgaccatattctctcagatttacagttccttgatttcagaagtacatattactggtgtagtttgtatatcaggtcacacaggcatcaagatctctgtatagcttggtaacataggcgtgatcaaataccatttctatgttcttacctgacaaaactcccccacttatgttaaagttcttgtttaatgattttaactattattttatttaataatctttcatcctattcattcactcattaagttaaagttctttttt

SEQ ID NO: 1111 - DNA, 373 bp, Mus musculus
  MOR185-9P
atggctgaaggtaacagttcaacagtatttcagttcattcttgaaggcctgacagatgacccagagcttgaggtcaccctctttgctgtgtttctagtcatctacttaactactgtcttgggtaacctaggactgattatgctaatccaagtcagccctcagcttcacacacccatgtactttttcctctgccacttggcattcgttgattttctgttatacatcctcagtcactccaaacacaattataaactttcttcgagaaatcaaaagtataaccttatatgcatgtgccactcaggtttgctgtttcatcacatttgctgtttgtgaaatgtacttgctgtcagtaatggcttatgacagatatgtg

SEQ ID NO: 1112 - DNA, 952 bp, Mus musculus
  MOR12-4
atgaagaactacaatagctctttggggttcttaccaacaacattcattttggttggcatcccaggactggagacagagcacatctggatatccatccccttctgcctgatgtacttcatcatcttccttgggaatggcaccatccttcatgtcatcagaacagatgcttcactgcatcagcccatgtatctttttcttgccatgctggcactggctgaggttggtgtctctgcctccactctaccaactgtgctaggtatcttcctttttgatacttcagagattacctttgaagcctgtcttctccaaatgtttttcatccattctttctccattatggagtcagctgtgttgctggccatgtctgtggaccgctttgtggccatctacagcccactacgttatacaactatcttgacactgcctcgcatctttggcacaggagctgtcattggactgaaaagtgttatactaatggccccattgcctatactcttaaggagattgcccttctgtggccacaatgccctttctcattcctattgtctccaccccaatcttatccatctaccttgtggggacatttctattgacaatatctatggacttttcattgtgacctccacttttgggctagattcattgctcattgtggtgtcctatgggcttatactccatactgtacttggaattgccactggagatgggaggaggaaagcactcaacacatgtggctcacatgtctgtgctgtgcttgcttattatgtaccaatgattggcttgtctatggtacatcgctttgcacatcatgtatctcctctgcttcaaaccatgatggccaatgcttatctcttcttccccccaagtcatcaaccccattgtctacagcatcaaaaccaaggagatccgtcgtggcattgttcgaatgctgtcagagaagaggttcagagtt

SEQ ID NO: 1113 - DNA, 966 bp, Mus musculus
  MOR18-3
atgccacagcccttggtccctctcatcgccaccccaaatggaagtttggcccatccagcctattttctactggtaggcatccctggcctaggatctaaaatccacttttggctggctttccccttatgctttatgtatgcagtggccacactgggcaacctggccatcatcttcatcattcgtgtggagaggcgcttgcatgagcccatgtacctcttcctcgccatgctttctaccattgacttggtcctctcttctgttaccatgcccaaaatggccagcttgttcctaactggcattcaggagatcgagttcaacatttgcttgacccaaatgttccttattcatgccctatctgccatggagtctgctgtcctgctggccatggcttttgaccgctttgtggccatttgctacccgttacgccatgcttctgtgctcacagggactactgtcgccaagattggcctagcttccctagctaggggatttgtattcttctttccactgcctttccttttgaagcgtctgtcatactgccaaacacatactgtcacacactccttctgtctccatcaagacattatgaagctgtcctgtactgataccaaagttaatgtcgtttatgggctcttcatcatcctatcagtcatgggtgtggactccctcttcattggcttttcctatatcctcatcctgagggctgtgttggagctttcaactcgaggggcagcactcaaggctttcaacacctgcatctcccacctctgtgctgtcctggtcttctatgtacccctcattgggctatcagtggtacataggctgggtggtcccacatctttggtccatgtgattatggctaatatctatctcctgctaccacctgtagtcaatcccattgtgtatggagcaaagacgaaggagatccgttcaagggttatccgtatgttttcacaagatggcagg

SEQ ID NO: 1114 - DNA, 1041 bp, Mus musculus
  MOR14-9
atgtttttcagagtgtgtcttcaagtcaccatgctgatcttcaataataccacatccccctcctcctccagcttcctccttacggccttccctggattagaacttgctcacgtctggatctccattcctgtttgtggtctctacaccattgcactcttaggaaacagtattattttgtttgtcattatcattgaacggagtctccacaagcccatgtactattttctctccatgctgtctgttgttgatctaggtctgaccatcacaacccttcccacagtccttggtgtcctttggtttcatgcccgggagatcagcattaaagtatgcctcattcaaatgttctttgtgcatggcttctcattcctggagtcttcagtattggtggccatggcttttgaccgctacttggccatctgcagccctctgaagtatgctactttcctgacagacatgatgagctttgtgatcggactgatcatctgtataagacaggtggttttcatgtttccctcagttatggctgtgaagagtgtgtccttccaaggaggccaagagctttcccatccattttgcttccatccagatataatcaaattcacatacaccaacccctggatcagcagcttctggggaatgtttcttcagctctacctgaacggcactgacttattgttcattcttttctcctacgtcctgatccttcgcactgttctgaacatcgtggctcctcaaaaacagcagaaagctcttagcacatgtgtttgtcacatctgtgctgtgaccattttctatgtgccaatgatcaccctgtctgtggcacaccgtctcttcagttctactcccagggtgatctgtagtattttgggcaatatgtatctgctcttgccgcctgtgctgaatcctatcatttacagcttgaagaccaaggttattcgccaagccatattccagctgttccgattcaaggatgcaaggggctacattatgaggagccttagaggaaggtgggctagaaggagacagttttccagtacatga

SEQ ID NO: 1115 - DNA, 990 bp, Mus musculus
  MOR14-10
atgtcaaccttccagaacaccacagcttcttccatcattttcctgctcactggtgtgcctgggctggaagccttccacacctggatctccattcccttctgctttctctatgcaactgccctgtcagggaacagcctgattctctttgtcattatcacccagcccagcctccatgagcccatgtgttatttcctctctatgctgtccaccactgacctcgggctctccatctccactctggccaccatgctggggatattctggttcaacgccagagagatcagcttcaatgcttgcttgtcacaaatgttctttattcaactcttcactgtcatggaatcctcagtgctgttggctatggcttttgatcgttatgtggccatctccaaccctcttaggtatgcttcggtcttaactgaccttaaaatagctcagattggagtagcaattgttaccaggggcacactgatactgactcctatggttgtccttcttaaaagattatcctactgtagcagccatgtgcttcatcactcctactgtttccaccctgatgtcatgaagctctcatgcacagacaccaggatcaacagtgcagttgggctcactgccctgatctccactgctggagttgactctgtcttcatcatcctctcctatgtcctgatcatcagaactgtcctcagcattgcttccccagaagagaggaagaaagccttcagcacgtgtatctcccatattggggctgtggctgtgttctatattccactgattagtctgtcctttgtccacagatttgggaaacgagctccgccatatgtccatactctgattgccaatgcctacctgctgatccctcctgtcatgaaccccatcatctacagtgtgaagaccaagaagatacggaaggctgtgttgaaagttttccattccagcatgacaagagctagtttgttgtttcatcgtttttctactttgtcattttatgaa

SEQ ID NO: 1116 - DNA, 927 bp, Mus musculus
  MOR250-5
gtgttattgaatcacacattagtcactgaatttctcctcttgggggtgacagacattcaagaattaaaccctattctctttgtcacggtccttgccatgtattttgtcaatgtggctgggaatggagccatcctgatgatcgtcatttcagatccaagactccacttgcctatgtatttcttcctgggaaacctagcatgcctagatatctgcttctccactgtaacagtgccaaagatgttagagaacttcttctctacaagcaaagcaatttccttcttgggatgcataactcagcttcatttcttccacttcctgggtagcacagaagccctgctgctgacagtcatggcatttgaccgctttgtggctatctgcagaccactgcactaccctgccattatgaacagtcagatctgcatcctggtggctatctccatctgggccattccttttcttcatgctttagttcactctatattgacgtctcaattgaacttttgtggttccaaccacatccatcatttcttctgtgatgttaagccattactggagctggcctgtggaaacactgagctcaacaggtggctgctcaatactctcacagggacagttgccattggcctcttttttctgacatttctctcttatttctacattgtcacgtatctctttctgaagactcgttcctgcagcatgctgcacaaagcactgtccacttgcgcctctcacttcatggttgtcatgattttctatgctcctgttctctttatttatatcaatcctgattcagggagctccctggaaaaggacaggatcattgctgtcatgtacactgtggtcacccctgcactcaatccacttatctatactctgaggaacaaggaagtgagaggtgctctgaatagaaaaatcagaatattactt

SEQ ID NO: 1117 - DNA, 936 bp, Mus musculus
  MOR32-11
atgtcttctatcaatagcacccagttccatccctctttctttatcctggtagggattccaggattggaaatttttcatatatggattgctttcccattctgtcttgtgtatctgacttcccttgtgggaaacatcaccattctctttgtgatcaagactgaacatagccttcaccagcccatgttctactttctagccacattgtcgataattgatctgtgtctatccacatctactatccccaaaatgttaggcatcttctggttcaatctccgggagatcagtttcgggggctgccttgctcaaatgttcttcatccacgtgtttacaggcatggaaactgttttgctagtggtcatggcttatgaccgctttgttgccatctgcaaacctctccagtacaccacaatcctcaccaataaaaccatcagccttcttctctcagttgttattggaagaaatttaattctcgtgactccgtttgtgtttctcattctaagactgcccttttgtggtcaccacatcatgcctcacacatactgtgagcacatgggtctggcccgattagcttgtgcacccatcaagatcaacatcatctatggactcgtagtgatttcccatatccttgtggacatgatcctgattgcctcttcctatgtgcttatccttcgagctgttttccgaattccctctcaagatgcccgattgaaggcgctaaacacttgtggttcccatgtctgtataatgctgtgtttttacacaccagctctgttttctttcatgactcaccgctttggccaaaacattccccactacatccacattcttttagctaatctgtatgtagtcattccacctgctctgaaccctgtcatttatggagtcagaactaagcagataagagagaaaattataaaaatagttgtacaaaaagaa

SEQ ID NO: 1118 - DNA, 936 bp, Mus musculus
  MOR271-1
atggagaaatggaatcagagttcaagtgatttcattctcttagggttgcttccacaaaaccaaactggcctactacttatgatgctcatcatacttgtcttctttctggccttgtttggaaactcagcaatgatccacctcattcgtgtggatccaaggctccacacccccatgtactttctcctcagtcagctctctctcatggacctgatgtacatttctaccactgttcccaagatggcatttaacttcctttctggccagaaaaacatctcttttctgggctgtggtgtgcagtcttttttctttttgaccatggcaggttctgagggcttgctcttggcttccatggcttatgatcgttttgtggctatctgccatccccttcactatcccattcgcatgagcaagataatgtgtctgaagatgatcataggatcctggatattgggctcaatcaactctttagcacattccatctatgcccttcatattccttactgccattctaggtccattaaccatttcttctgtgatgttccagccatgttgcccctggcctgtatggacacttgggtttatgagtacatggtgtttgtgagcacaagcctgtttctcctactgcctttccttggtatcacagcttcctatggtagggtcctttttgctgtcttccacatgcgctcaaaagagggaaagaagaaggccttcaccacatgctcaactcacttaactgtggtgacattttactatgcaccttttgtctatacctatcttcgacctaggagtcttcgctccccaacagaagataagattctgactgttttctacactatccttacccccatgctcaaccccatcatctatagtctgaggaataaggaggtcctgggggccatgacaagagtccttgggacattctcttccatgaaacca

SEQ ID NO: 1119 - DNA, 963 bp, Mus musculus
  MOR101-2
atggaaaacatagcctgtaatgggtcagggaactctcagaccagcttctaccttacaggcatcccctctctacaaaaatcgctcttccttcccgtcttcctcatctttctcctcctctacctgctcatcctggtggggaacgccctgatcctggtggctgtggtggccgagcgcagcctccacaagcccatgtacttcttcctaatcaacctctcggctctagacatcctcttcaccacaaccactgtcccgaagatgctgtccctgctcctgctgggagaccgcttcctcagtttccctgcctgcttcctgcagatgtatctgttccacagtttctcctgctcagaagccttcatcctggtggtcatggcctatgaccgctatgtggctatctgccgccctctgcactaccccgtccacatgaccccacagacaaacactgcactggcagccagtgcctggatcaccgccctcctcctgcccatcccagcagtgatacagacttcccagatggcgtttgacaacattgcctacatctaccactgcttctgtgaccacctggccgtggtccaggcctcctgctcagacaccactccccagacactcatgggcttctgcattgccatggtggtgtccttcctccccctcctcctggtgctcctctcctatgcccgcatcctgtcctcagtacttcggatcaactccaaggaagggcgttccaaagccttctccacctgcagttcccacctcctggtggtgggcacctactactcgtccattgccatagcctatgtggcttaccgagctgacctccctgtagacttccacatcatggggaatgtagtctatgcaattctcacccctgttctcaaccctctcatctacaccctgaggaacaaagatgtcaagtcggccatcactaaaatgatgtgtcaccaggatccaaagagtattggaaagccc

SEQ ID NO: 1120 - DNA, 987 bp, Mus musculus
  MOR36-1
atgagacccaaacttcatccttacagaatggcagaaagttcgcagtccaattctaccttccaacacccagctttctttatattgactggcatcccagcattgggagatggccaggcctggctgtccctagtgtttgggctcatgtatctgctggccctactaggcaatgcaacactcctgacagtaatccgaatagactctacattgcaccaacccatgtttctactcctggccactctggcagctactgacctgggcttagccacatctatagccccagagttgctggctgtgctgtggcttggaccccaacctgtacaatacactgcctgcctaatccagatgttctttgtccatgcactgactgctatggaatctggtgtgcttttggccatggcctgtgatcgggctgtggcagtggggcgtccactacactaccctatcttggtaactaaagcccgtgtgggctatgcagtcctggcactgacactgaaagtcctggctgttatagtgcctttccctctgctggtagtacgatttaagcactttcatgccaagatcatacaccatgcctattgtgcacacatggcagttgtagagctggtagttggtaacacatgggtcaacaacatgtatgggctagcactttcactggctgtgtctggtgtagatattctgggcattgctggatcttatgggctcattgcccatgcagtacttcggctacctacccaggaggcccgagtaaaggcctttggtacatgtagttctcacatctgtgtcatcctggccttctatgtgcctggtctcttctccttcctcacccatcgctttggtcgtcacactgtcccaaagccagtgcatatccttctgtccatcatctatttgctgctgccacctgccctcaaccccctcatctatggggtccgcaccaagcagattagggaccgattcttagaaatgttcaaattcagaaaaaagcagttt

SEQ ID NO: 1121 - DNA, 966 bp, Mus musculus
  MOR42-2
atgggtgaggatggaaataccagtatcttcaacctttcctacagcagcttcctcttggtgggcttccctggattgcaggaagggcgaccccttctggtcctgcctcttacctttctctatgtgtccatcgtttctgccaatgccttagtcattcatacagtggtggcccagaggagtctgcaccagcccatgtacgtgctcattgctctgctcttggctgtcaacatctgtgcctccacagccgtgatgcctaaaatgcttgaaggctttgtgcattatgcaaatcccatctcactccgcggctgcctcacacaaatgttcttcatctactttacgctccttctggactacaatctcctgctggccatggctctagatcgctatgtggccatttgccacccactccgctatactgacctgatgacctcacacttactgggcctgatggccacttttgcgataacgcggagcctaggagtggcagtgcccctagtggtactaactgcaaaagctcaattctgcaagacatctgtcataagacacttcacctgcgagtacatcgcattgttgagcatcgcttgtggagacctgaccttcaacaaccgcttgggattagctatgcgtttggtcactgtgacttttgatctggccttattgggaacctcctatacccgtatcatctatgcagccttccggatctcttctgggggagcccgagccaaggccttgcacacttgtggctcccacttactggtcatcctcaccatctacctttctggtctttccacttccattgtctttcgagtggccaagactgtgtctcaagatgtccagaacctactcagtgccatatacctgctgctcccaggagccttgaatcctctcatttatggggtgagaactaaggagatccggcaacacatagagaaaatgctctgtggaatgcagtcaccccaagacagcaga

SEQ ID NO: 1122 - DNA, 936 bp, Mus musculus
  MOR12-5
atgttcaacagcagtcaattcaccccaaaatacttcctgctgaccggtttccctggtctggaagcatggtacccttggctgatcttcccattctgtttcacatatactataggcatcatgggcaataccctcattctggctgtgatcagaaaaaacagttctctgcaccagccgatgttcttgttcctggccatgctggccttctccgagcttggtgtctctgcttcgaccctgcccactgtgctcagcatctttctgctcggtgccaataaaatctgctttgaagcctgccttttgcagatgttctccatacattcattttccatcatggagtcaggagttcttctagccatgtctgtggatcgctttgtcgccatctacaacccactccgatacaccgccatcctgactctgccccgcattgctggtaccagtcttacacttggattgaagagtctgttgctcatgttccccttgccttttctcctaaagcgtctgcctttctgtggtcacaatgtgctttcccattcctactgtctgcactcagatctaatccaacttccctgtggggacactcgtcccaacagcattctggggctctgcatcgtaacttccacttttgggctggactctctgctcattgttgtctcttatgtgttgatcctgtacacggtactaaacattacctctggggaggggcggaggaaagctctcaatacctgtgtgtcacatatgtgtgcagttcttgtgtactatgtgcctatgatcagcgtggctctggtgcatcgattcatgaagcatgctgtacctgctgttcgccttctcctggccaacatctatcttctggtaccaccgatgctcaatcccatcatctacagtgctaagaacaggcagattcgccaggggttaatacaactctttcttcaaagaaaatat

SEQ ID NO: 1123 - DNA, 963 bp, Mus musculus
  MOR40-11
ctggatactaagcgtgcaactaacagctcagagttccaagtctctgagttcattctgctgggattcccaggcattcatgaattccagatctggctgtccttgcctatggctctgctttacattgtagctcttggtgctaatctccttatcttgatcaccatctaccttgagcctaccctgcatcagccaatgtatcagtttcttgggatcttggctgcagtagatattggcttggctaccaccagcatgcccaaaatactggccatcttgtggtttgatgccaagaccatcagcctccctgagtgttttgctcagatctatgctatccacacttttatgtgcatggagtcaggcgtcttcctatgcatggcaatagatagatatgtagccatttgttatcccctccaatatccttccatagtcactgaagcttttgtaatcaaggccacactgtccatgctgctcaggaatggcctgttaaccatcccagtgcctgtactagctgcccagagacaatactgctccaggaatgaaatagatcactgcctttgctctaacttgggggtcattagtctggcctgtgatgatatcactgttaacagattctaccagttggcattggcctggcttgtggtaggaagtgacatgattctggtctatgcttcttacgctttgattattcgctcagtgctgaggctgaactccactgaggcagcatctaaggccctcagcacctgcagctcccacctcatcctcattatgttttactacacagctattgttatagtatctgttactcacctagcaggaagaagggttcccctcatccctgttctcctcaatgtgatgcatattgtcatccctccatcccttaaccccatggtatatgcccttaggacacaggagctgaaggtgggcttccggaaggtttttgagtcattatgtgtccagaaagtaaactga

SEQ ID NO: 1124 - DNA, 966 bp, Mus musculus
  MOR286-1
aacaggtcccagacagcagacccgaagaacagcagcactgtgactgagttcatcctcgtgggctttgagcagagctccccttccacacgggcattgctcttcaccctcttcctggctctctacagcctcgccatggccatgaatggcctcatcatcttcatcacatggactgaccccaggctcaacagccccatgtacttcttccttggacacctgtctttcctggacgtctgcttcatcaccaccaccatcccgcagatgttggtccatctggtgaccaagaaccacactgtctcctttgtctcttgcatgacccagatgtacttggtctttctagtgggtgtagccgagtgcatcctcttggctttcatggcctatgatcgttatgttgccatctgccacccactgaactatgcccagatcatgagccagaaggtgtgtgtcaggctggtgtgttcttcctggatctttgggatggtcaatggtatctttcttgagtatatatcattcaggaatcccttctgcaaagacaaccacatagagaacttcttctgtgaggctcccatagtgatcgctctctcctgcggggacctcaagttcaccatgaagttgatctttgtggatgccattgtggtgttgctcagtcccatggtgctcatcatcacctcctatgcccgcatcctggcctccatcctccgcagggcctcctcctcaggtagggggaagacattctccacatgtgcctcccacctgaccgtggttgtctttttctacacctcagccatgttttcttacatgaatccccgcagtacacatgggcctgacaaagacaagcctttctctctcctctacaccattatcacccccatgtgcaacccggtcatctacagcttccgcaacaaggaaatgaagggggctatggggcgggctcttgggataggtagcctggctcaggcagagtctgtc

SEQ ID NO: 1125 - DNA, 966 bp, Mus musculus
  MOR286-2
agaccccaaaagggagactcgaggaacagcagtagcactgtgactgagttcatcctcgtgggctttgagcagagctccccttccacacgggcattgctcttcaccctcttcctggctctctacagcctcgccatggccatgaatggcctcatcatcttcatcacatggactgaccccaggctcaacagccccatgtacttcttccttggacacctgtctttcctggacgtctgcttcatcaccaccaccatcccacagatgttggtccatctggtgaccaagaaccacactgtctcctttgcctcctgtttgactcagatgtatctggtttttggtgtgggtgtggccgagtgcatcctcttggctttcatggcctatgatcgttatgttgccatctgccacccactgaactatgcccagatcatgagccagaaggtgtgtgtcaggctggtgtgttcttcctggatctttgggatggtcaatggtatccttcttgattacatgacattccgaggtccgttctgcagagaaaaccacatagagaacttcttctgtgaggctcccatagtgatcgctctctcctgtggggaccctgagttcagtctgaaggtgatctttatggatgccattgtggtgttgctcagtcccatggtgctcattgtcacttcctatgcccgcattctggcttccatcctccgcagggcctcctccgcaggtagggggaagacattctccacatgtgcctcccacctgaccgtggttgtctttttctatacctcagccatgttctcttacatgaatccccgaagtacacacgggcctgacaaagacaagcctttctctctcctctacaccatcatcacccccatgtgcaacccggtcatctacagcttccgcaacaaggaaatgaagggggccatggggcgggctcttgggagaggcagcctggctcaggcagagtctgtc

SEQ ID NO: 1126 - DNA, 924 bp, Mus musculus
  MOR160-3
atgaggaacttcagtgtcgtctctgagttcatcctccttggtctgtctgatgatgcacaggtccaggctctactctttgtggctttccttgtgatctatgtcctgaccctgacagggaactccatgattctgttggtgataagggtggatgctcacctccgctctcccatgtacttttttctgggtcacctctccttcctggatcttttgtattcgtcagtctccacacccaagatgctggagaatctggtgtctgagacaaaaaccatccctgtgaagggttgcctggcccaagccttctttgtgtttgccattgggggtactgaggctttgcttcttgctgtcatggcctatgaccgctatgcagccatttgccaccctctactctatggtcagatgatgaacgactggttctgccaggtgctagtgtggggatcctggatcctggccatcctgaactcactcattaataccctcctagctgtgagtttggacttttgtcactatggaaccatacacaactacaactgtgagtttccctccctcttccctctctcctgctccgatgtctccactaatgccactgccatagtctgtagttttgtcatacacgcctctggaaccttccttctcgtggtaggttcttatggctgcattttctccactatcctgaacatgagctccaccaggggtaggagcaaggcattttccacctgctcctcccacctcaccgtagtgatgttgtactttggttcggcctgcctgcgctacgtcatgcccacctcaggttctccagtggaaatgtacttctctgtgcagtacagcgtcatcacccccatgctgaatccctttatctacagtctgaagaaccaggaggtgaaggcggccatgagaaagctgctggcaagatgctaccagcatttt

SEQ ID NO: 1127 - DNA, 948 bp, Mus musculus
  MOR283-11
atggagctctggaactccaccttggaaagtggcttcatcttggtggggattctgaatggcagtagctctcctgaattgctctgtgccatagtcacagccttgtacatgttggcactgatcagcaatggactgctactccttgtcatcacagtggatgcccggctccatgtacccatgtacctcctactgaggcagctgtctctcattgacctcctcttcacatcagttgtcacccccaaggctgtcatggattttcttttgagagacaacactatatcctttggaggctgtgcccttcagatggctctagcattgatgctaggcagtgcagaggacctccttctggccttcatggcctatgacaggtatgtggccatttgtcatcctctcaattacatggtcttcatgagtcctacggtatgctggttgatagtgtctacatcatggatcctggcatctcttactgcagtaggtcatactgtgtacacaatgcacttccctttctgtatgtcccaggaaattagacacctgctctgtgagatcctgcctttgctgaagctgtcctgtgtagatacctcccaatatgagctcatggtttatgtgacaggggtgacattcctcttactccccctttctgccattgttacctcctacacactaattctgtccactgtgctgcacatgccttcaaatgaagggaaaaagaaagcccttgtcacctgtctttcccacttgatggtggttggaatgttctatggagctgccactttcatgtatgtcctacccagttcattgcacagtgcaaaacaagacaatataatctctgtgttttacacaattgtcaccccagctctgaacccccttatctatagcctgaggaataaggaagttattggagctttgagaagggtcttgggcagatacatcctgccagcacaccttactctt

SEQ ID NO: 1128 - DNA, 951 bp, Mus musculus
  MOR103-16
atggaaaacatcaccaacatcagtgagttcatcctcatgggcttccctactgctccatggctgcaaattctgcttttctccatcttcttcataacttatgtgtttgtgcttttggaaaatctggtcatcattcttactgtatgggtcactgggtcactgcacaagcctatgtactattttctgagtactatgtcctttctggaggcctggtatatatctgtcactgtccctaagatgctggctggattcctatttcgccccaataccatttctttcttgggatgtatgactcagctttacttctttatgtcccttgcctgtactgaatgcgtacttttagctgccatggcctatgatcgttatgtagccatatgttggcctcttcgctatccagtcatgatgaccacaggattttgtgttcaactgaccatcagttcttgggtgagtggcttcaccatctccatggcaaaggtgtactttatctcacgagttgccttctgtggcaataatgtcttgaaccattttttctgtgatgtgtcacccatccttaagttagcctgtatgaacttatctatggctgagacagtagattttgcccttgccatcgtcatccttatattcccactctcagccactgttctttcctatggcttcattgtctctactgtcctgcaaataccatcagccactgggcagcggaaggccttctccacctgtgcttctcatcttacagtggtggtcatcttctacacagctgtgatcttcatgtatgtccgacctcgggccattgcttcgtttaattctaacaagctgatctcagccatctatgcagtcttcactcccatgctcaaccccattatctactgcctgaggaacaaggaagtcaaagatgccatcagaaaaaccatagcaggtggtagagcaccggccttgggagagtctatttcttaa

SEQ ID NO: 1129 - DNA, 939 bp, Mus musculus
  MOR176-2
atgcagtttgaaaactttaccactgtttttactgaatttgtcttgttaggactttctggcaggcaggatgtgcaacagggcctctttgcattgttcttccttgtttatggcataactgtaattgctaatctagggatgatcctgctgatcaagttggacagcaggcttcacacacctatgtactatttcctgagcaatctgtccttctgtgacatctgctattccaccattatctctccaaagatgctggctgatttcttgtctaaagagaagaggattccttataatttatgtgctattcaactgtattttttcggggcctttgcagatgtagaatgtctcatgctagctgtcatggcctatgatcgttatgttgccatctgcaatcccctgctctatacaattaaaatgtccaagaagctctgcatccagcttgtggctgttgcctatgcaataggcttggtggattcaacaatccacacatcctgtgcattcagattgtccttctgcaattcaaatgtcatcaaccactttttttgtgaccttccacccttgctggccctctcctgctcagatacatccatcaatgaaatagtgatgttcacattaattggctgtgtggtagggtgtagcattgtcacagtccttctctcctactgctacatcattgcaaccatctgcaggatgaactctgctgaaggcaggcacaaagcattttccacctgtgcttcccacctcatggctttggccattttttatggaactctgcttttcatgtatttccgacccagctcaagttactccatggacacagacaaaatggcctctgttttctacacagttgtgattcctatgttaaacccactcatctacagtttgagaaataaggatgtgaagggggctctgaagaaggcaatcaatattaacttgtggcctggg

SEQ ID NO: 1130 - DNA, 969 bp, Mus musculus
  MOR264-17
atgttttatttactgtctgtagatgaagagaaaattaaagcagaaaaatcgaatgcctcttcgctgattgaatttatcctacttggtttttctgatgtccccaatctccaatggattctgtttgggatttttttgatcatgtatttgactattctgatgtgcaacagtactatagtgctcataacaagaactgaccctgctctgcagacccctatgtatttttttcttagcaacttttcttttgtggagatatgttatgtaacagtcacaattccaaggatgcttgtggacctgtgtactcagaaaggaaatatctctatacttgcctgtgccactcaaatgtgttttatccttatgcttggaggcacagagtgcctcctcctgacagcaatggcctatgaccgttacgtggccatttgtaatcctctacactattctttagtcatgaaccacaggatctgtacacagttagtggcagcctgctggatcagtgtcataccagttgtaattggacaaacataccagattttctctctgcctttttgtggctctaacagaattaatcacttcatttgtgatatcccaccagtactcaaacttgcttgtggtgacacatttgtgaatgaaatagcagtctacgtagttgcgatggtatttgtcatggttccctttatgctgatcattttctcctattgcaaaattatctgcagtattctgaaactgtcatcagccaaaggaaggaccaaagctttctccacctgctcctctcacctcatagttgtagtcttattctatggaacagctagtatcacatacttacaacccaagccaaatcaatcagaaataactggaaaactgttgtctcttttttacactattttgataccaactctgaatcccattatatacactctgaggaataaggacatcatggctgctctgagaaaactagttagtaagatactagtg

SEQ ID NO: 1131 - DNA, 933 bp, Mus musculus
  MOR176-3
atgacatttgagatcatcactgtttttactgattttgtcttgttaggactttctggcaggcaggatgtgcaacagggcctctttgcattgttcttccttgtttatggcataactgtaattgctaatctagggatgatcctgctgatcaagttggacagcaggcttcacacacctatgtactatttcctgagcaatctctccttttgtgacatctgctattccaccattatctctccaaagatgctggctgatttcttgttgaaagaaaagaggattccttgcaatttatgtgctcttcagatgtactttttaggggtctttggagatacagaatgtctcatcctagctgtcatggcctatgattgttatgttgccatctgcaatcccctgctctatacaactacaatgtccacgaagctctacatccagcttgtggctgttgcctatgcagtaggcttggtggattcagcagtccacacatcctgtacattccaactgtccttctgcaattcaaatgtcatcaaccacttttcctgtgaccttccacccttgctggccctctcctgctcagatacatccatcaatgaaatactgctctttatatttagtacactcgtgatagggtgtagcattttccacatccttctctcctactgctacatcattgtgaccatctgcaggatgaactctgctgagggcaggcgcaaagcattttccacctgtgcctcccatctcatggctgtggccatttttcatggaactcttttcatgtatttccaacccagctcactttactccatggacacagacaaaatggcctctgttttctacacagttgtgattcctatgttaaatccactcatctacagtttgagaaataaggatgtgaagggggctctgaagaaggtaatcaatattaacttgtggcctggg

SEQ ID NO: 1132 - DNA, 942 bp, Mus musculus
  MOR264-18
atgaaacacactgacatcagggaagaggacaacgcttccacagtgacacagtttcttctgcttggattttctgaccttccaaacctccagagctttctgtttggggtgttctccataatgtacttgattatgctaattgcaaatagcttcataattgtgataaccaagcttgaccctacactacagaagcccatgtattttttcctggtcaacttttcttttctggaaatctgttatgtatcagtcattctccctagggttctgtacagcatttggacccaagacagaaatatttctcttttggcctgtgccacacaaatgtgcttcttcctaatgttggcagccactgaaagtatttttctggctgtgatgtcctatgaccgctatgtggccatctgtagtcctctgcactatcctctggtcatgagtccaagaaaatgcaggcagctggcagcagggtcctggctcggtggcatgccgtttcaggttgggcaaacctgtcaaatattctctctacatttctgtaactctaaccaaatagaacacttcttctgtgacataccccctgtgcttaaactggcctgtggagacacttctgttattgagatgtatgtctatgtagtggctatcctgcttgcagcaatcccttttatactaatactaacatcttacagcaaaatcattgccaccatcctgaggctgccaactgctgaaggacgatcgaaagccttcttcacatgttcttcccacctagtggtggtggttttgttttttgcccctgcatctattacctacttaatgccaaaatcatctcattctgcagtaagtgacaaattcctttctcttttctacaccatcatcacccccgtgttcaatcccatgatatacagccttaggaacaaagaggtaattgcagctctgagaagattgttgcttacaaca

SEQ ID NO: 1133 - DNA, 931 bp, Mus musculus
  MOR135-25
atgaacaataaaactgtcttctcccagttccttctcctgggcctgcccatcccccccagagcaccagcacctgttctatgccctgttcctggccatgtacctcaccaccgtcctggggaacctcatcatcatcaacctcataatactggactcccatctccacacacccatgtacttgtttctcagcaacttgtccttctctgatctctgtttttcctctgtcacaatgcccaagttgctgcagaacatgcaaagccaggacacatccatcacctatgtaggttgtctgacacaaatgtactttttgttagtttttggagacctggagagctttcttcttttggtcatggcctatgatcgctatgtagccatctgcttccctctgcattacaccagcatcatgagtctcaagctctgtgtatatctggtgctgatgtcctgggtatttaacttgctgtattccatgttgcactctctactcttagctagattgtcattctgtgaagacaatgtgatccgccactttttctgtgacatacctgccctgctcaagttgacctgttctgacattcatattaatgaattaatgatattagtcttaggaggactcactatggtcatcccattcttacttattgttgtgtcttatgtacaaattgtctcctccattctaaatatttcttctgctagggttatacaaaagattttctccacctgtggatcccacctatctgtggtctcactgttctatggaacaatttttggtctctacttatgtccatcagctaataactctactgtgaaggagattgtcatggccatgatgtgcacagtggtgactcctatgttgaaccccttcatctacagactgaggaacagaaacatgaaagaggccctgataagagtccttttcaagaagaaaatctctttg

SEQ ID NO: 1134 - DNA, 940 bp, Mus musculus
  MOR185-10
atggctaacagcaatcactctgcagtgtctgagttcatccttgtggggctcacagatgactcagagcttcaggtcagtctcttcggtgtgtttcttgtcatctacctaactagtgttgtgggtaatgttggattgattgtgttaattcaagtgagtcctcagcttcatacccccatgtattttttcctaacccacctggcttttattgacttttgttttacctcttctgtcactccaaacactctggtgaattttctacgtgaagtcaaaagcataaccttctacgcatgtgccactcagttgtgctgctttgtcacatttgtagtttgtgaactgtacttgctgtcaatcatggcctatgacaggtatgtggccatctggaatcccctcctctatgcggtccgcatgcctagggagctctgtcttcaggtcatcgccagcacatacatttatggattcactgtggggcttgcacaggcagtggcaactttccgcttgtctttctgtggctccaatgtgatcaaccacttctactgtgatgatgtccccttagttgctctggcctgttctgacactcacgtcaaagagctgatgttgctaatcattgctggcttcaacactctttgctctctggtgattgtggttatttcttatatctgcattctctttgccatcctgaggattcattctgctgaaggaagaaggaaagccttttccacttgtgcatcccacctgacttccatcaccatattttatggaacagtaagttttatgtacttgcagcccaagtcaagtcattctctgaacacagataaatttgcttcctgtgttttatgtggtagtaattcccatgttaaacccactgatctacagcttgagaaatcaggaagtaaagagtgctctgaagagaattgtagaaaagttatcttcagccatcaag

SEQ ID NO: 1135 - DNA, 933 bp, Mus musculus
  MOR135-26
atgcctggaaacaaccagactatcatctctcagttcttactcctgggcctgcccattgcccctgagtacgagcacttgttctatgccctgttcctggccatgtacctcaccaccgtcctggggaacctcatcatcatcatcctcataatactggactcccatctccacacacccatgtacttgtttctcagcaacttgtccttctctgatctctgcttttcctctgtcactatgcccaagttgctgcagaacatgcagagccaggacacatccatcccctatgcaggatgtctgacacaagtgtacttttttctgttttttgcagcccttgagaacttcctacttgtggccatggcctatgaccgctatgtggccatctgcttcccccttcattatgccagtatcatgagccccaagctctgtgtgagtcttgtgctgctgatctgggtgctgaccacattgtatgccatgttgcacactttgcttttaactaggttgtctttctgtgaaaacaatgtgatcccccactttttctgtgatctgtctgctctcctgaagctggcctgctctgatattcacattaatgagttggtgatattgatcataggagggcttgttgtcctacttccatttctactcatcattgtgtcttatgcacgcatcatctcctccatcctcaaggtcccttcaactcgaggcatccacaagctcttctccacttgtggttctcacctgtctgtggtatcactgttctatgggacaattattggcatctacttaggtccatctgctaataactctactctaaaagacattgtcatgtctatgatgtacacagtggtgactccaatgttgaacccttttatctatagcctgaggaacagagacataaagggagctctaaaaaaagtgtttcaaaagaaatctctccta

SEQ ID NO: 1136 - DNA, 936 bp, Mus musculus
  MOR135-27
atgcctggaaagaaccaaactgtcatctcccggttcatcctcctgggcctgcccataccaccagagcaccagcacctgttctatgccctgttcctggccatgtacctcaccactgtcctggggaacctcgtcatcattgtcctcattcatctggactcccatctccacacacccatgtacttgtttctcagcaacttgtccttcactgacctctgcttttctactgtcacaatgcccaatttcctgcaaaacatgcagagccaagtatcatccattccctatgcaggctgccttgcacaaatgtacttctttttgttttttggtgatgttgagagtttactccttgttgccatggcctatgaccgttatgtggccatctgcttccctcttcattataccagaatcatgagcccaaacctctgtgtgagtatggtgctgctgtcctgggcactgacaacattgtatgccatgttgcacactttgctcttaactaggttgtctttctgtaaaaacaatgtgatcccccattttttctgtgacctttctgctctcctgaagctggcctgctctgatattcacattaatgagttaatgataatgataattggagcacttgttgttatacttccatttctactcatcatagtgtcttatgcgcacattgtctcctccattctcaaagtcccttcaactcgaggcatccacaaggtcttctccacttgtggttctcatctgtctgtggtgtcactgttctatgggtcagtcattgttctgtacttatgtccatcatctaataactctactgtgaaggatactgtcatgtctatgatgtacactgtggtgactcccatgctgaaccccttcatctacagccttaggaacagagacatgaaggaagctctaaaaagagtgcttcaaaagaaaataaaactctct

SEQ ID NO: 1137 - DNA, 948 bp, Mus musculus
  MOR135-28
atggaaagaggaaatcaaactgttgtttcagaattcctcctcctgggcttgcctattgaaccacaccagcaagaccttttctatgccctgttcctgtccatgtacctcaccactgccctggggaacctcatcatcatcatcctcattcacctggactcccatctccacacacccatgtacttgtttctcagtaacctgtccttctctgacttctgcttttcctctgtgaccattcccaaattgctgcagaacatgcaaagccaagttccatccataccctatgcaggttgcctggcacaaatgtactttttcctgctttttgcagatctcgagagcttcctccttgtggccatggcctatgatcgctatgtggccatctgcttccccctacactatactagcatcatgagccccaagctgtgtctctgcctggtggcactatcttggctactgaccacagtcatctctttgtcacacacactgctcatggctcggctctccttctgtgctaacaatgtgattcctcactttttctgtgatatgtcagctcttctgaagttagcctgctctgacattcagatcaataagttgatgatatttatcttgggaggacttgtcattattgtcccattcctgctgatattttcatcctatgcacgaatagtgtcctccattctcaaggtcccctcttctagaagcatccgcaaggccttctccacctgtggttcccacctctctgtggtgtctcttttctatgggacaatcattggtctctatttatgtccatcagctaataattcaaccattaaggagactgtcatggctgtgatgtacacagtggtgacccctatgctgaacccctttatctacagcttcaggaatcaggatataaagggagcttttaaaaaggtgttttcaaagcagatggctaacttttctctgagatag

SEQ ID NO: 1138 - DNA, 960 bp, Mus musculus
  MOR266-8
atgttgactggaaaacttgtccttaaccaatctgggactcctgagttcgtgttccgtgtcttcaccaatgctcctgaattccaggctcttctcttcaccctcttcctcctgctgtatctgatgatcttctgtggcaacactgccatcatctgggtggtgtgcacccacacttccttgcacacacccatgtatttcttcctcagtagtctgtctttcctggaaatatgctacaccacagatgtggtacccctgatgctttctaacatctttgggacccagaagcctatatcgctggctggttgtgggactcaaatgttcttcttcctcactctgggaggtactgattgctttctcttggcaattatggcctatgacaggtatgtggccatctgccaccctctgcactacaacctcatcatgaccaagaagctgtgtgttcagatggtgatgggctctttaagcttggcactgtttctctccctgcagctcactgccttaattttcaccctgcccttctgtggacattacctggaaatcaaccactttctttgtgatgtgcctccagtcctgcgcctagcctgtgctgacattcatgtgcaccaggcagtcctctacgtagtgggcatcctggtgctgacagtcccattcttgcttatcttcatttcctatgtgttcattgtttccaccatcctgcgcatgcgctctgcagagggtcgccaaagggccttttccacctgctcttctcacctcactgtggtcttgctacagtatggtggctgtagcttggtgtacctgaggccccgctcgagcagctctgatgatgaggaccggcaaatagccctggtctacacctttgtgactccattactcaaccctctgatttatacccttaggaacaaggatgtcaaaggtgctctgaggaactccatcttctgtaaatcagcatctcactgtagttaa

SEQ ID NO: 1139 - DNA, 957 bp, Mus musculus
  MOR266-9
atggtggatagaaaccctttcttcaacaaatctggtccaccagagttcgtgttccgtgtcttaaccaatgttccggaatttcaagcaatcctcttcaccctcttcttccttctctacttgatgatcctctgtggcaataccaccattatctgggtggtgtgcaaccacagctccctgcacactcccatgtacttcttcctgggcagtctgtcatttgtggaaatctgctacatcacagatgtggtgcccttgattctttccaacatctttggagaccaaaaacccatatcactggctggttgtgggacacaaatgttctttttctctgtctttggctgcacggattgttttctcttgacggtcatggcttatgacagatatgtggccatctgtcacccactacactacaacctcatcatgacccagaaactgtgtgtccagatggtaataggctctttgagcttggcacttcttctctccttggagcttactgcctttactttcacattgccgttctgtagacaccgccttgaaatcaaccacttcctctgtgatgtggctcctattatgcgcctggcctgtgctgacatccatgtgaaccaggcagtcctctatgtagttagtatcctagttctgacagtcccattcctgctcattttcatctcttatgtgttcattgcttctaccattctacgcatgcattctgcagagggacgccagagggcattctccacctgttcctcccatctcactgtggttttgctacaatatggctgttgtagcctagtgtacctgagaccccgctccagcacctcagaggatgaggatcgccaaattgccctggtttatatctttggtactccattactaaaccctctgatttacaccctcaggaataaagatatcaaagatgctttgaggaactctttcttccatgtaccagcttctgacactagt

SEQ ID NO: 1140 - DNA, 927 bp, Mus musculus
  MOR228-2
atggctgacatacacaatgtgactgagttcctttttctgggactctcttctaacaaagaggtggagatagtttgctttgtaatatttctgctcttgtacatggccattgtgcttgggaatcttctcatggtggtcactgtggtagccagcagaagtcttggatcccccatgtacttctttcttggctacctctcctttgtggagatctgctactcctccacaacagctccaaaactcatcttggaccttctagctgaaaaaaaatccatatctgtatggggctgcatgacacagcttttcttcatgcacttctttggtggcgctgagatattcctgctcacagtgatggcctatgaccgttatgtggccatctgcaagcccctgcactacaccagcattatgaaccgaaatgtgtgtgcagtcctcgtaggaacagcatggataggaggctttgtgcattcctttgcccaaatacttctcatctttcctttgcccttctgtggccccaatatcatcgatcattatttctgtgacttgcttcctttgcttaaacttgcctgctcagacaccttccttattggcctactgattgttgccaatgcgggaactctgtcagtgatcagctttgtggtcctcttagcatcctatgtggtcatcttgttccatctaagaactcagagtgctgagggacggcgcaaagctctgtccacctgtggatcccatgtcactgtggttatattgttctttggtccatgtgtcttcatctatttgaggccttctgataccctacctgtagacaagatgatagctgtgttctacacagtgataactcccctgctcaatcctctcatctactccctgagaaatgcaaaagtgaagaaaaccatgaagagtctatggttcaggacaatgaaagtagatgagaaa

SEQ ID NO: 1141 - DNA, 927 bp, Mus musculus
  MOR228-3
atggctgacatacacaatgtgactgagttcatttttctggggctctcttccaatcaagaggtgcagaaagtttgctttgtgatatttctgctcttgtacatggccattgtgcttgggaatcttctcatggtggtcactgtggtagccagcagaagtcttggatcccccatgtacttctttcttggctacctctcctttgtggagatctgctactcctccacaacagctcccaaactcatcttggatctcctagctgaaaaaaaatccatatctgtatggggctgcatgacacagcttttcttcatgcacttctttggtggcactgagattttcctgctcacaatgatggcctatgaccgttatgtggccatctgcaagcccctgcactatactagcatcatgaaccaaagtgtgtgtgcagtcctcatgggaacagcatggataggaggctttgtgcattcctttgctcaaatacttctcatctttcctttgcccttctgtggccccaatatcattgaccattatttctgtgatttgcttcctgtgcttaaacttgcctgctcagacaccttcctcattggtttgctgattgttgtcaatgggggaacactgtcggtgatcagctttgtggtcctcttagcatcctatggagtcatcttgttccatctgagaactcagagtgctgagggacggcgcaaagcactgtccacctgtggatcccatgtcactgtggttatattgttctttggtccatgtgtcttcatctatttgaggccttctgataccctacctgtagacaagatgatagctgtgttctacacagtgataactcccctgctcaatcctctcatctactccctgagaaatgcagaagtgaagaaagccatgaagagtctatggttcaggacaatgaaagtagatgagaaa

SEQ ID NO: 1142 - DNA, 927 bp, Mus musculus
  MOR232-9
atggagaataaaaggaatgtgactgaattcatcttgataggtcttacacagaacccccaaatgcagaaagtagtgttcgtgacatttttggttctatacatgacaacaatttcaggcaacctcctcattgtggtcactatcatcaacagccaggctctgaattcccccatgtatttcttcctgagccacctctccttgatagatacaatttacacttcttcttcagctccaaagctgattgcggactcccttcaagagaacaaagtcatctcctttaatggatgcatggctcaagtctatgcagagcacatttttggtgctactgagatcatcctattgacagtgatggcctatgaccgctatgtggccatctgcaaacctctgcactatatgaccatcatgagccacaagctatgcattctcctggtgggggtagcctggactggaggatttctccatgcaactattcagatcctttttacagtgtggctgcccttctgtggccccaacatcatagaccattttatgtgtgacttgtatccattgttggaacttgtttgcatggacacacacatccttggtctctttgtggctgccaacagtgggttcatctgcctatttaatttcctgctcttgatgggatcctatgtgatcatcttgcgctctttaaagaactatagcttagagggcaggcgcaaagccctctccacctgtgtgtctcatatcacagtggtagttttattctttattccttgcatatttgtatatctacgtccagtgaccactttgccacttgataaaggtgttgctgtgttttatactatggtggctcctatgctgaatcctttaatctacaccctcaggaatgctgaagtaaaaaatgcaatcaagaagctctggagaaaaaaagtaacttcagatagtaat

SEQ ID NO: 1143 - DNA, 916 bp, Mus musculus
  MOR251-5
atgatgaatgggacactggtcactgagttcctcatcctgggattctcagaaatgcctcaccttcgggtacctcttctcttcagcttcctctgcctatacatggctgcaatctcaggaaacttgctcattatggtgacaatcagtgccagcccagccctgcatacccccatgtacttcttcctggtcaacttggccattgtggacatcctctgcacctccaccatcctacccaaactactggacagcatgatgacaggaaggaccatctcttacgggggctgcatggcccagctcttcttcttcacatggtcactgggagcagagcttctgctcttctcagctatggcctatgaccgctttgtggccatctgctgtcccctgcactacagtgcttggatgggccccagggtgtgtgcattcctggctggcattgtctggactatcagcctgactaacaccagcgtgcacacaggcctgatgttgcgtctaccattctgcagctccaatgtgatagagcacttcttctgtgagattcccccactgttgaagctttcctgtgctccaacgcaattgaatgaggccatggccttcgctgcggatgtgttcctggctgtagggaacttctctgtgacaatcctctcctatggctttattgtggccagcatcctgaagatccggtcagctgagggcaagcgacgagccttctccacctgctctgcacaccttatcgtggtcaccatgtactactccactgtcatctacacctacattcgcccttcatccagctactcactgaacaaggacaaggtgggtgtccatcatctacacctcagtggcacccaccttgaaccccctcatctacaccctgaggaacaaggatgtcaaagttgcactccggagacttctctcctgctgc

SEQ ID NO: 1144 - DNA, 942 bp, Mus musculus
  MOR266-10
atggaggaggaaaatcagacaggagtggtatatttccacttccgccccttttcaaccaactctacagtggcttccctagtgtttgtgggcttcttgctgctgtatctaggaagtctcattggaaacctcaccattgggctcacagtctggcaggatcactccctccataccccgatgtacttcttcctttttgtgttggccacattagagcttggctattccaccaacattgctccactgactctagctagcattctctccatggggaagatgcttatctctctgcccagctgtggggcccagatgttcttcttcatcctccttggaggatctgactgtgtcctgctggccatcatggcctatgacaggtatgtggccatctgtcatccattgcattacagcctcattatgagttggcagctctgtgggcagatggctttaggttctctggggctgggtttccttttgtcactgcctttgaccattctgatctgccacctcccattctgtggccacaatgaaatctaccacttcttctgcgacatgcctgcagtcatgcgcctggcctgtacagatacccatatacaccaggcagctctctttgccatcagcgtggctgcagtagccattccttttctccttatctgtctctcctatggttgcattgtggctaccatcctgaggatgacgtcagcagaggggaaacgccgggctttctccacctgctcttcacacctcctcgtggttgtcctgcagtatggatgttgcaccctcatctaccttcgccctagctccagctactccccggaagaaggccgggcagtatctgttgtctataccttcttctccccattgctgaatcccttaatctacagtttaaggaaccaagaggtgaccgatgcagtaaaaagacttttgacaagaatgttctggttcagaaag

SEQ ID NO: 1145 - DNA, 939 bp, Mus musculus
  MOR204-32
atggagcctggaaactacacagttgtaacagaattcattcttttagggttaacagatgatattacagtcagtgtcattttatttgttatgtttctaatcgtctattctgttactttaatgggtaacttgaacataattgtgctaatcagaaccagccctcagcttcacacccccatgtaccttttccttagccatttggcctttctagacattgggtactccagctcagttacacccatcatgctgaggggctttctcagaaagggaacatttatccctgtggctggctgtgtggctcaactctgtattgtggtggcatttgggacatctgaatctttcttgctagcttccatggcctatgaccgctatgtggccatctgctcacctttgctctactcaacacagatgtcctccacagtctgcatcctcctagttggaacttcctacctaggtggatgggtgaatgcttggatatttactggttgctccttaaatctgtcattttgtgggccaaataaaattaatcactttttctgtgactattcaccactattgaagctttcttgttctcatgacttttcttttgaagtcattccagcaatctcttcgggatccatcattgtggtcactgtgtttatcattgctctgtcttatgtctacatccttgtgtcaatcctgaagatgcgctctactgaaggtcgccagaaggccttctccacctgcacttcccacctcactgcagtcactctgttctttgggaccatcacattcatttatgtgatgccccagtccagctactccacagaccagaacaaagtggtgtctgtgttttacacagtggtgatccccatgttgaatcccctcatctacagtttcagaaacaaagaggttaaagaagccatgaaaaaactgattgctaaaacacattggtggtcctga

SEQ ID NO: 1146 - DNA, 929 bp, Mus musculus
  MOR225-11
atggaaaaaagcagtaatatcacagtctttattttattgggactttcccaaaataagaacactgaaattctctgctttgtattttttttttattttgctacattgctatttggatgggcaatgttctcatcatggtttcaatcacatgcactcacctcgttgagcaacccatgtatttcttcctcaactatctctcactctctgacctctgctacacatccacagtgacccctaaattaatgactgacttactggcagaaaggaaagttatttcctataataattgcatgatacagctcttcacaactcatttatttggagggattgaaatctttattctcacaggcatggcctatgaccgctatgtggccatctgcaggcccctgcattacaccatcatcatgagcagacatagatgtaacttgatcatcatgacttgttgcactgggggatttgtgcactcagccagtcaacttcttcttactgtcttcttaccattttgtggcccaaatgagatagatcactatttctgtgatgtgtaccctttgttgaaattggcctgttccaatacacacataataggtcttttagtcattgctaactctggcttaattgctttagtgacgtttgttgtgttgatgacctcttattttttcatattgtataccataagggcatattctgcagaaagccggagcaaagctctatctacttgcagttcccacttaaccgttgtagtcctgttttttgcacctgcactattcatttacatcagaccagccaccacatttccagaagacaaagtatttgctcttttctataccatcatagcacccatgttcaatccactgatctacacactgagaaacacagagatgaagaatgccctacggaaagtttggggtcatcaaggacttctgaaggggagg

SEQ ID NO: 1147 - DNA, 970 bp, Mus musculus
  MOR198-4
cacacaaacagcactaaaatcacagtaattcattttactggggctcacagatcgcccagaactccagcctctcctctttgtcctgtttctgtttatttaccttgtcaccgtcttaggcaacatgggcttgatggctctgattagactggattcccgccttcacaagcctatgtacttcttcctcagtaacttggcatttgtggatctgtgttatacctcaacagccaccccacagatgttgaccaatttcttatcagaaaagaagacaatttccttcattggctgctttatccagtgctaccttttcattgcacttctccttacagagttttatatgctggcagccatggcctatgaccgctatgtggccatatgcaaccctctgcgttacagtgtgaaaatgtccaggcgagtctgcatctgcttggccatgtgtccttatatctatggcttctcagatggactattccaagccatcttgaccttcagtatgaccttctgtaaatccaatgtcatcaaccacttctactgtgctgacccaccacttattaagctatcttgctctgatacttacaaaaaagaacatgccatgttaatatcagcgagctttaacctttccagctcccttacaatcatcctggtgtcctatgccttcattattgctgccatcttaaggatcaaatcagctgaaggaaggcacaaggcattctctacttgtggttcccacatgatggctgtcacattgttttatgggacactcttctgcatgtatgtaagaccacctactgacaagactgttgaagaatccaaaataatagctgtcttctacacctttgtgagtcctctgctgaatccattgatctacagtctgaggaataaagatgtaaagcaggccttgaaaacaatactcaggcaaaacgtcatcaggacagcattgatgcgtccaccttccaacaaactgcaacaataa

SEQ ID NO: 1148 - DNA, 936 bp, Mus musculus
  MOR143-1
atggaagcagagaaccatacagccatagtacatttcctccttattggtctttcagaagatcctaaaattcaatctgttctttttggactattcctatctatgttcctgattaccatgcttggaaactttctcattgtcttagtcaccagctgtgactcccaccttcacacccccatgtactttttcctctgcaacctgtcatttgttgacatttgtttaacctccactactatccccaaaatgttggtgaacatttacatgcacaccatgaagatatcctacacagagtgccttactcaagtatatttttttaataattttcttggaatggataattttctactgaccattatggcctatgatcgttttgtggccatctgtcatccacttaactacacagtcatcatgaaccctcgaatctgtggccttctggttcttttatcttggatcattatgttctgggtttccttgattcatatgctgttgatgaaacaactgaacttctctactagcactgaaatcccacatttcttttgtgaactcactgagcttctcagggtggcccgctctgatacccacataaataacatttttctgtatttggttactgcagtgctaggtatgtttcctgtcattgggatagctttctcttattttcacattgtctctgctttaatgaaaatgtcctccattaagaataagtataaagccttttccacctgtgggtctcacctctgtgtggtatccatgttctatgggacaggatttgtagttcatctcagttctgctgtagcccattcatccaagagaaacacaatcacttcaataatgtacactgttgtcacccctatgttgaaccccttcatctatagcttgcgaaacaaggatgtaaagggggccttagtaagactccttagaagagttaaattttgtcct

SEQ ID NO: 1149 - DNA, 916 bp, Mus musculus
  MOR248-15
atggaagaaggaaaccagactgtggtgtctgagtttatttttcagggactttgtgcttcaaaggaactacagctcttccttcctgctgccattttccatcctctatctaatggctgtggtaggcaacctctttgttgtgatattgatcatcattgatcatcatctccattctcccatgtactttctgttagctaatctatcatttattgacttctgcctttcctcagttaccacccccaaactgataactgacctcctaaaagataacaaaaccatttcctttgggggctgcatgagccagatcctctgtgtgtacttctttggaggaagtgagatggtgcttcttgtaacaatggcctatgaccggtatgtggccatctgcaggccactccactacagcagcatcatgggcagacagaagtgcatctggcttgttgtgatatcatggaccattggctttatacatgccatgagtcaactgatactgattttggatctgcctttctgtggacctagagtgatagacagctttttctgtgatatttctttggtgatgaaattagcctgcatgaatactgatactctggaaattctaataaatgctgacagtggtgttttggcaacaacttgtttcatcctcttactgatatcttatactaacattctattaactgttcaacttcactctaaagatggttcatcaaaggcattatctacatgcacatcccatatcatagtggttttgctgttctttgggccagtcattttcatctatctgtgtccagttagcatcacctgggttgacaactttcttgccgtattttactcagtcatcacacctctccttaatccagccatctacacactgagaaacaaagatattaaaaatgccataaagaagctgataaaccacttg

SEQ ID NO: 1150 - DNA, 831 bp, Mus musculus
  MOR248-16
ctaccattttccatcctctacctgatggctgtggtaggcaacctgtttgttgtgatattgatcatcattgatcatcatctccattctcccatgtacttcttgttagccaatctatcatttattgacttctgcctttcttcagtaaccacccccaaactgaccatagatctcctaaaagaaaataaaaccatttcctttgtagggtatatgaggcagatcgtctgtgtgcacttctttgcaggaggtgagatggtacttcttgtaacaatggcctatgaccggtatgtggccatctgcaggccactccactacagcagcatcatggacagacagaagtgcatctggctcgttgtgatatcatggattgttggatttgtgcatgccattagtcagatgctcttgattttggatctacctttctgtggacctagagtgatagacagctttttctgtgatattcctttggtgatgaaattagcctgcatgaatactgatactctggaaatcctaataaatgctgacagtggcattttagcaacaacttgtttcatcctcttgcttatatcttatacttacattctattaactgttcaacatcgctctaaagatggctcatcaaaggccctatctacatgcacatcccatatcatagtggttctgctgttctttgggcccatcatttttatctatctgtggccagtcagcatcacctgggttgacaagtttcttgctgtattttactcagtcatcacacctctccttaatccagccatctacacactgagaaataaagatattaaaaatgccataaagaaactcataagtcacaag

SEQ ID NO: 1151 - DNA, 885 bp, Mus musculus
  variation (44)...(63): Any nucleotide A, C, G or T
  MOR248-17P
agttggcataagtaaaaataagttaagtgtttgactcaccattnnnnnnnnnnnnnnnnnnnnctcttactaccattttctgtcctctatctgatgactttggtagataacctctttgtagtgatattgatcatcactgatcatcatttcaattctcccatgtactttctgtcagctaatctatcatttgttgacttctacctttcctcagtaaatacacccaaactgaccatagatctcctaaaagaaaataaaacaatttcctttgggggctgcatgagccagatcctctgtgtgcatttctttggaggaagtgagatggtgcttcttgtaacaatggcctatgaccagtatgtggccatctgcaggccactccactgcagcggcagcatggacagacagaagtgcatctggctcgttgtgatatcatggattgttggatttgtgcatgccattagtcagttgctcttgattttggatctacctttctgtggacctagagtgatagacagctttttctgtaatattcctttggtgatgaaattagcctgcatgaatactgatactctgggaatcctaataaatgctgacagtggcattttagcaacgtattctttcactctcttactgatatcttatacttatattctattaactgttcaacatcgctctaaagatggctcattaaaagcactatccacatgcacatcccatatcatagtggttctgctgttctttgggcccatcatttttatctatctgtggccagtaaacatcacttgggtggacaagtttcttgctgtgttttatacagtcatcacacctctcctgaatccagcaatctatacactgagaaataaagatattaaaaatgctataaaaaac

SEQ ID NO: 1152 - DNA, 939 bp, Mus musculus
  MOR193-1
ctgcatggagagacagaaccttcaccagtcgtgaaagatttcatcctgataggcatcactaatcggcctgagctgaagggtccattgtttgggctgttcctcatcatctatctgatctcattaatgggaaatatgggcatgatcatactcacaatagtggaccctcgactgcaaacacccatgtacttctttctcaaacacttggctgtcactgatcttggttattctacagctgtaggacctaaaatgttagaaaattttgtcgtgaaccaaaatacaatatcctattatctttgtgctttacagctagcttgctttcttctgttcattacctgtgagctttttattttgtctgccatgtcctatgaccgctatgtggccatctgcaaccctctgctctacaatgtcatcatgtcaaagaagaaatgttggctactaatagtaattgcttatctgtatggtttgtttctgtctcttataattactttaaagatgttcaggctttcattctgcagctacaatataatcaatcattttttctgtgactgtatccctttgataccattgctctgttcaaacactcatgaaattcagttgataattttagtatttgccatttttgattcgatttgttctcttctggttgttcttgtgtcttacctcctcatcctcataaccattctgaggatgaactctactgagggcaggcacaaggcttttgcaaattgtggatcacacataactgtcgtcaccgtcttctatgggactttgatatctatgtatttgcagcctaattatagtcactcttttgacactgacaagttggcatccatcttttataccatgattatccccatgttgaatcccttgatctacagcttgaggaacaaggatgtaaagaatgctggacagaggatatggaagaagttgtgcaagatt

SEQ ID NO: 1153 - DNA, 948 bp, Mus musculus
  MOR284-2
atggacctgaagaataaaactacatccagtttcatcctgctggggctctttcccagctgcaggtacccaaacctccttatctccttcatcctcctcatctacaccctggcctcggctggaaactccctcttgatactcctcatctggctggacccccgtctccacacacccatgtacttcctgctcagtcagctgtctgtcattgacctggcttatatctcctgcacagtgcccaaggcagccatcaactacttcaccgggaggcggaacatctccttctttgcctgtgccactcagatgttttccttcctcacccttggccttgctgagtgcatcttactgacactaatggcctatgaccgttatgtggctgtctgtaaccctctgaggtataccattctcatgagccccaaggtctgtctgatgatggccgcctccacctggatcggagcagttaccgcagccctcgttcataccgtataccccatgaattttcctatctgcggctccagggagatcaatcattacttctgtgagatgcccgctattctgagaatgtcttgtgtggatacatctgtctacgagatggtgaagtttgtgtcaactattatctttctcctgaccccattcactttgatcctgacttcctataccctcatattcctcactgtcctcaggatgaactctcccaaggggcggaataaagccttggccacctgctcctcccacctgactgtcgtgagcctctattttggtcaagccatcttcatctacatgacgcccacttcttcccacacacccgaccaggaccaggtaggtgctgtgctgggcaccatagtgacccccatgctcaatcctcttatctacagcctgagaaacaaggaagtgataggggccctgcagaagtgcaccggcagatgctgcagccgtgatagagttggctccctc

SEQ ID NO: 1154 - DNA, 945 bp, Mus musculus
  MOR256-47
atgggagcaaccaacgacagcaccttcagccatttcatccttactggcttctctgaccggcctgagctggagagggtcctcttcgccatcctcctgcccgcctacctcctgaccctgctgggcaacagcaccatcatcctggtgtccaggctggacccgcaccttcacacccccatgtacttcttcctcacacacctgtccttcctggacctcagcttcaccagtagctccatcccacagctactctataacctcagcgggccagacaagaccatcagctatgtgggctgtgctctgcagctggtcctgttcctgggcctggggggtgtggagtgcctgctgctggctgtcatggcctatgaccgatttgtggcgatctgcaaacctctgcactacatggtcatcatgagccccaggctctgcgtgggcctggtctcagtggcctggagctgcggtgtggccaactccttggctatgtctccagcaactctcagcctaccccgctgtgggcaccacagggtggatcacttcctctgcgagatgccagctctcatcaggatggcctgtgtcaacacagctgtcgttgaaggcattgccttcatcctggcaataggcatcgtgctgtcgcccctggtgttcatcttggtctcctatggttacattgtaagagcggtgttgcgaatcagctcagctgcaggacggcagaaagcatttaatacgtgtggctcgcacctcaccgtggtctcgcttttctacggaaatatcatctacatgtacatgcagccggggaacagctcctcccaggaccagggcaagttcctcaccctcttctacaacattgtcacccctctcctcaaccctttgatctacacgctcaggaacaaggaggtgaagggggcgctcagaaggctgctcctgggtagccgagagacagggaaagtaagg

SEQ ID NO: 1155 - DNA, 942 bp, Mus musculus
  MOR130-1
atggaaggagccaacctcagtggggtgtccgagttcttgctgctaggcttgtcacaggaccccagacagcagcagctgctcttttctgccttcctgagcatgtaccttctcacaggcctagggaacctgctcatcatcctggccattgctgctgatcccaggctgcacacccccatgtactttttcctggccaacctggcctttgtagatgtctgcttcacctccaccaccatccccaagatgctggccaaccatgtgtcaggacacaaaggaatctcttactctggttgcctcacacagatgttctttttcatctggtttgccggcattgacagcttcttgctgactgccatggcctatgaccgctttgtggccatctgtcaccctctacattatacaacctcgatcacaccacggctgtgtggcttcctggtcactgcatcctgggcctcagcctttgcaaatgccctgacccacacagtccttctgactcgcctcttgttctgtggccacaaccaggtcccccacttcttctgtgacctcagcccacttctgaagctagcctgtttagatacctctctcaatgacatcatggtatacactgtgggcgcattgcccatcatcacccccttcgtgggcatcttgacctcctacacacgcatcttcacagcagtgttgaggatcccatctacaggagggaaatggaaagcattctccacctgtggctcccatctctccgtggtgtccctcttctatgggacactgattggggtgtacttcagtcccacatcctcccacacagcccagaaggacacagcagctgcagtgatgtacactgtggtcacacccatgatgaaccccttcatctataccctgaggaacaaggacatgaaaggtgccctgatgacctttgtccgaaggacggcagtccttgttaggtag

SEQ ID NO: 1156 - DNA, 981 bp, Mus musculus
  MOR276-2
atgttttcagatgacccggtacagcagctgagcatggccatgtggttgaaccagtcatccacagatgactttatcctcttgggcatcttttcctacagcccaagagatcttcttcttttctctgtggtcatgctggtcttcacagcagcattgtttgggaatgccctcctcatcctcctcatctgcactgacccccgactccacacccccatgtacttcttcctcagtcagctctccctcatggacatcatgttggtctgtaccaatgtgccaaagatggcagtcaacttcctgtctggcaagaagtccatctccttcgtaggttgtggcatacaaattggcctctttgtctgtcttgtgggatctgaggggctcttgctgggactcatggcttatgatcgctatgtggccattagccacccacttcgctatcctgtcctcatgaatcagaaggtctgtctgcagatcattgggagctcttgggcctttgggatagcagatggtctggtgcagatggtagtggtaatgaccttcccctattgtagcttgagggaggtggaccacttcttctgtgagatgctctccttgctaaagttggcctgtgtggacacatccctatttgagaagatagtgtttttttgctgtatcttcatgctgctgtttcccttctccatcattgtagcctcttatacccgcatcctaggaaccgtactccatatgcactctgctaaatcccagaaaaaggctctggccacctgttcctcccacatggcagctgtctctttcttctatggagcagccatgttcatctacctgagaccaagacaataccgaaccccaagccaggacaagatggtgtctatcttctacacagtccttactcctatgctcaaccccctcatttatagcttgaggaatcgcgatgtgataggagcactgcagaaagggctggaccgatgcagggttggcagccagccctga

SEQ ID NO: 1157 - DNA, 939 bp, Mus musculus
  MOR170-11
atgctcatggccatggagaatgactcttctgtgactgagtttgtttttatgggattaacagaacaacctgagttacagctgcctttgttttttgtgttcttgctgaattatacagctaccgtgatgggaaatttgagcttagtggttcttatttgtctgaattcacaccttcacaacccaatgtactttttcttgttcaatttatccttggttgatttctgttattcatttgtttgtacccctaaaatgctaatgggttttgtttctgaaaaaagcatcatatcttatacaggatgcatgactcagctattctttttctgcttttttgttaattctgagtgttatgtgctgacagcaatggtctatgatcgttatgtggccatctgtaagccattggtatatgccatccttatgtctcctcggatgtgttccctgctaatgattgggtcctacttaatgggatttgcaagtgccatggctcatactggctgcatgattaggctcaagttttgtgatttgaacatcatcaaccattacatgtgtgaaatattccccctgctccagctctcctgcagtagtacctatgccaatgaacttgtgagctctcttattgcctgtatagttgtcattgtatctggtcttgttatcttaatgtcatatgcttccatcctcttaaatgttgttcagatgtcatcagctacaggttggtccaaagccatgggtacttgtggttcccatatcataactgttagtctattctatggttctggactgcttacttatgtcaaaccagcatccgctgaatctgtagatcaggggaaatttttctcagtgttttatactcttatggttcccatgctgaatcctcttatttacagtctcaggaacaaggatgtcaaacttgcagcaaagagaaccatgaagagaatcacaatctga

SEQ ID NO: 1158 - DNA, 927 bp, Mus musculus
  MOR140-1
atggagttgaaaaatgacacacaaatttcaaaatttattctcctgggaatttcagaggatcctctatggcaacctttcctttttggactatttttgttcatgtacttggtcactctgcttgggaaccttctcattatcattgccaccattacagattcccatcttcacacacccatgtacttcttcctttccaacctgtcctttgcagacatctgctttacttctgctagcatcccaaagatgctagtgaatatacagacaaagaacaaggtgataacctatgaaggttgcatttctcaagtattctttttcatactatttggagttttagataactttcttctagctgtgatggcctatgaccgatatgtggcaatctgtcaccctctgcactatatggtcatcatgaactgccgcctctgtggatttttagttttggggtcttgggtcacaacagcattgaattccttgctgcagagttcaatggcactgcggctgtccttttgtacagacttgaaaattccccactttgtttgtgagcttaatcaactggtactacttgcctgtaatgacacctttcctaatgacatggtgatgtactttgcagctatactgctgggtggtggtcctcttgctggcatcctttactcttattctaagatagtttcctccatacgtgcaatctcatcatcacaggggaagtacaaagcattctccacctgtgcatcccacctctcagttgtttcattattctattctacactcttgggtgtgtatcttagttcttcttttacacaaaactcacactcaactgcacgagcatctgttatgtacagtgtggtcacccccatgttgaacccattcatctatagtttgaggaataaggacctaatgggagctctgagaagactcttaagaaggaagtca

SEQ ID NO: 1159 - DNA, 948 bp, Mus musculus
  MOR259-8
atgtgggtggttctaggacagaaccaaagttgggtctctgagttcatcctgattggcttctccagcgaccccacaaccaacagcatcctcttcattgtcttccttctcatctacctgagctcagtactgggcaacgggctcatcatcatgctggtctgcctggacacacagctgcacactcccatgtacttcttcctctctaccctctccctgttggatatgagctatgtcaccaccaccatgccccagatgttggtgcatcttcttgctcactctcagaccatctcctttgttggctgctggctgcagatgtttgttttcagtgccctgggtataactgagtgcaccttctttgttgtcatggcttatgaccggtatgtggccatttgttatccactgcgctatactgtcatcctcaactggggcctctgcatacatttgacagcagggtcttgggtctgtggtttattctcttctttgttacatacttttttcaccatgagtctgccatattgtgggccaaacagggtcaaccactacttctgtgaaggtccttcagtgcgtagcctggcttgcatggatactcatgttattgagatggtggattttgtattgagtgtttttgtgattgtgattccaatttccctcattgtggcctcctacattggtattgccaaggcaattctcaagatcaagtccacagaggggcgctgcaaggctttctctacctgtgcctcccacctaactgtggtcacattcttctatgctccagccacttacatctacatgaggcccaactccagttactcccctgagagagacaagcagatctcactcttttataataccttcacagccttgctcaaccctgtggtctatagtctgaggaacaaagatatcaagagggcatttttcaaggtgatgggacatggtaggatggactactga

SEQ ID NO: 1160 - DNA, 936 bp, Mus musculus
  MOR128-1
gaaactagaaaccaaaccatcatctctgacttcctccttacgggcttctctgaccacccagagcagcagcctctcctgttcacactcttcttgggaatgtacctggtgaccttattggggaatctgttcatcatcctggccattgtctctgaccagcatcttcatacacccatgtacttcttcctggccaacctttccttcattgataactgcttaacctgcaccattgtccccaaagtgctgactaacatccaaacccagcatcaaaccatctcccacactgggtgccttctgcagatgtatttcttcatgacaatggccatgcttgatgacttcctactggctgtgatggcctatgatcgctatgtggccatctgccttccactacactacaccactatcatgtgtccccaaagatgcctgttgctggtggccacatcctggctctgctccaacctcctggccttatcactcatactccagatggctcaagtctccttctgtgcctcccattccattccacactttttctgtgatcttctcccactcctcaagcttgcctgttcagacacccatacctttcagctcataatgtttgctgaagctgctctatcaggtgtggtccctcttacttgtgtcctagtctcttatgcccatatcatgaacaccatcctcaagatcccatcttctgggggaaagcataaagtcttctctacctgtggttcacatctgacagtggtcactctgttctatggaactgtctttctggtgtatttccagccatcatcctcctactctgaaaatactggaatagtggcttcggttgtttatacaatggtcacccccatgatcaatccttttatctacagcttaaggaacaaagacatgaagggagctttgtggaaactatttggcttggggaaacactgtaatctg

SEQ ID NO: 1161 - DNA, 930 bp, Mus musculus
  MOR221-2
atgaacaattccaccctggtgactgagttcctcctggaggtttttgctgagtcttgcgagctcagaatccttctcagtgtgctgttcctgctggtgtacctgggcagcctgttcgggaaccttatcatcatcattgttactacagttgaccagacactgaacacacccatgtatttcttcctcaggaatctgtctattgtagacatgtgttatgtttctgtcactgtcccaaatgcttgtttcaactctctcactggccagaggaatatttctgtgactgggtgtgcagcacaaatcttttttgtcttcttttgtgcatgtgtagagatgttttttctcaccatcatggcccaggaccgctatgtggccatctgtaagcctctgctctaccctgtgatcatgaaccaccagttctgtgttcagatgacactggcttccctacatagctctcttatcattgcaagtgtgcacactttcaaaactttccaactgtccttctgtcactctaatgtggttcctcagttcttctgtgatatcccctctttgttgaagctttcatgttcagatacctttaacaacaaactcttaatgctaatctctgccattatcattggttgcagctgctttacattcattgctgtatcatattttaggatattatcaactgtgttgaaggttcctgtcaaaggagagagagggaaagccttttccacctgtgtccctcacattgttgtggtgtctgtgtttcttagttcttctacctatgtgtatctaagacctccagtaccaacattagaagtagttaaggagatggctctttctgtgtcttatacgattgtcccaccattcttaaatcctatcatctatagtcttagaaacagacagataaaggaggctgtgaagaaagtaatattaagaatttctttggta

SEQ ID NO: 1162 - DNA, 939 bp, Mus musculus
  MOR153-3
ttctttaggaatacagagtataaaaatcaaacatttgcttcagaatttattcttctgggattgacagatgatccagaactgcagctcatcctctttggaattttcctcttcatgtatctggtcacagtgctaggcaatctcatcatcatctgcgcagtcagtcttcatcccaaactccataccccaatgtacttctttctctcgaacctgtccttcactgacatctgcttcatcaccagcacagtccccaagatgctggtgaatatccagaaacagaacaatgccatcagttacccagattgccttacacagatgtactttgttatttttcttggtggaatggaaaactttcttcttgcagcaatggcttatgatcgctatgtggccatctgccatccacttagatacacggtcattatgaatccaagcatctgtattctgctaactttgttgtcagtgctcagtagcacgatagatgccctgctacacagcctgttggttttgcgactatccttctgcacatacttgaaaatcccccactttttctgtgaacttgctcatataatcaagctgtcatgttctgacactctcatcaataacatagtggtatacttggcaactttcatatttggtggacttccattttggggcattattttatcttatgttcaaattgtctattcagttttgaaaaagccctcagtaagaggtagttacaaggccctttccacctgtgggtcacacttgtcagttgtttccctgttttatggctcagtgattggggtctatatcagcttcgcagtgactgactcatctagaaaggctgcagtagcttcggtattgtatactgtggtccctcagatgctgaacccctttgtttatagtctcaggaacaaagacatgaaagaagccgtgaggaaattatgtggtgggattctg

SEQ ID NO: 1163 - DNA, 927 bp, Mus musculus
  MOR228-4
atggctgacatacacaatgtgactgagttcttttttctgggactctcttctaatcaagaggtgcagagagtttgctttgtgatatttctgtttttgtacatggccattgtgcttgggaatcttctcatggtggtcattgtggcagtcagcagaaatcttggatcccccatgtacttcttcctcagctccctctcctttgtggagatctgctactcctccacgacagccccaaaactcatcgtggatctcctagctgaaaagaaatccatatctgtatggggctgcatggcacagcttttcttcatgcacttctttggtggcattgagatgttcctgcttacgatgatggcctatgaccgctatgtggccatttgcaagcctctgcactacaccagcatcatgaaccgacaggtgtgtacagtccttgtaggaatggcatggatgggaggttttgtccattcccttgcccaggtccttctcatcttccgcttgcccttctgtggccccaatatcattgaccattatttctgtgatgtgcttcctgtgcttaaacttgtctgctcagacaccttcctcattggtctgctgattgttgtcaatgggggaacactgtcggtgatcagctttgtggtcctcttatcatcctatgcagtcatcttgttccacctgagaactcagagtgctgagggacgtcgcaaagctctgtccacctgtgggtcccatgtcactgtggttgtcatattttttgcaccctgtgtcttcatctatctgagaccgacagccactcttcctatagacaagatggtaactgtgttctacaccgtgataactcccctcctcaaccctatcatctactccctgagaaatgcagaagtgaagaaagccattaagattctatggaccagggcaacaaaagtagataaaaaa

SEQ ID NO: 1164 - DNA, 897 bp, Mus musculus
  MOR259-9
cttggcttctccagtgtccccacaaccaacagcatcctcttcattgtcttccttctcgtctacctgagctcagtcctgggcaacgggctcatcatcatgctggtctgcctggacacacagctgcacactcctatgtactttttcctctgtaccctctccctgttggatatgagctatgtcaccaccaccatgccccagatgttggtgcatcttcttgctcattctcagaccatctcctttgttggctgctggctgcagatgtatatgttcagtgccctgggtatagctgagagcatcctctttgttgtgatggcttatgaccggtatgtggccatttgctatccactgcgctatactgtcatcctcaactggggcctgtgcatacggttggcagcagggacttggatctatggttccttttcctctttgttgcatactttcttcaccatgagtctgccatattgtgggcccaacagagttgaccactatttctgtgaaggtccttcagtgcgtagtctggcttgcatggatactcacctcattgagatggtggacttggtgttgagtgtttttgtggttgttactccaatttccctcattgtggcttcctatattcacattaccaaggcaattctcaagatcaagtccacccaggcccgctgtaaatctttctctacctgtgcctcccacctgactgtggtcacatttttctatattccagccatttacatctacattaggccaaactccagctactcccctgagagagacaagcagatctcactcttttacaatgttttcacagccttgctcaaccctgtggtctatagtctgagaaacaaggacattaagagggcatttctcaaggtgatgggacttggtaggatggactggtga

SEQ ID NO: 1165 - DNA, 936 bp, Mus musculus
  MOR137-2
gtgaggagggagaatcagagcactgtgttcgagttcctcctcctggggctccccatcagaccagagcatcagaatgtcttcttcaccatgttcctggccatgtacctgaccacagtgctgggaaacctgctcatcatcttgctcatcaggctggaccctcacctccacactcccatgtacttcttcctcagccacttggccttctctgacatctctctttcatccattacagttcccaaaatgctgatgaatattcaggctcagcaccattccatctcttacaagggatgcatctctcagatgtatttttttattctgtttgtctgcctggacaatttccttcttgcagcgatggcctatgacaggtatgtggccatctgtcatcctctgcactatatcactgtcatgagggaggagctctgtgtctgcctagtcgctgggtcctggttcttcagctgtgtccacgccctgctgcacaccctcctcttgatccaactgtccttctgtgccagtaatactgtccccaacttcttctgtgacctcactgccctcctgaagctgagctgctcagacatctccctcaataagctagtcatcttcactgagggaggattacttttcatcctgcctctgagtagcatcatgggctcttatattctcataggaagaactgccttgaaggccccctccacaaagagattcattaaaaccttttctacctgtggctcccatctccttgtggtgtctttgtactatgggacacttgcaggtgaatactttttctcttcattccagaactccagtgacaaagacatagtggcttctgtaatttatacagtagtcacacccttgctgaaccctttcatctacagcctgaggaacagtgatataaaacaggctctagaaattgttgtcactaagatcaactgctttaag

SEQ ID NO: 1166 - DNA, 951 bp, Mus musculus
  MOR42-3
atgtcagggtggagcaatggcacctacaatgagtcctacaccagcttcctcctcatgggcttcccagggatgcaggaagccagagccctcctggtgctgcccttcctcagcctctacctggtgatcctcttcaccaatgccctggtcatccacacggtggcatcccagcgcagcctgcaccagcccatgtacctgctcattgccctgctcctggctgtcaatatctgcgctgccaccaccgtggtgccccccatgctcttcagcttctccacacgcttcaaccgcatctccctccctcgatgcttgggacaaatgttctgcatctacttccttattgtctttgactgcaacatcctcctggtcatggctctagatcgctatgtggctatctgctaccctctccgctacccagaaatagtgacaggacagttactggctggtctggtggtgctggcagtcaccaggagcacaagcattgttgctccagtggtggtgctggcctcgcgggttcgcttctgtcgctcagatgtgatccgccactttgcctgtgagcacatggccctgatgaagctttcctgtggggacatctcgctgaataagacggtgggactcactgttcgcatcttcaaccgagtcctggatatgctcctgttaggtgcctcctactcccgcatcatccatgctgccttcaggatctcatcaggtggagcacggtccaaagccctgaacacctgtggctcccacctgctggtcatcttcaccgtctactcctccaccatgtcctcatccattgtctaccgtgtggcacgcactgcctcccaagatgtgcacaacttgctcagtgctttctatctgttgctcccctgtctggtcaaccccatcatctacggggccagaaccaaggaaatcaggcagcacctggtagctctgttccaaaggactcagcaacag

SEQ ID NO: 1167 - DNA, 927 bp, Mus musculus
  MOR250-6
gtgttattgaatcaaacattagtcaccgaatttctcctattgggagtgacagacatacaagaactgaaccctattctgtttgtcacggtccttgccatgtactttgtaaatgtggctgggaatggagccatcctgctgattgtcatttcagatccaagactccactcacctatgtatttcttcctgggaaacctagcatgtctagacatctgcttctccactgtaacagtgccaaagattctagataacttcttctccacaagcaaagcaatttccttcttggggtgcataactcagctttattttttccaccttctgggtagcacagaagccctgctgctggccgtgatggcatttgaccgctttgtggctatctgcagaccactccactacccttccatcatgaaccgtcaggtctgcatccaggtggctatctccatctgggccattccttttgttcatgcactggttcactccatattgacatctcaattgaacttttgtggttccaaccaaatccatcatttcttctgtgatgttaagccattactggagctggcctgtggaaacactgaactcaacaggtggctgctcaatactttcacagggacatttgccattggcctcttctttctgacattcctctcttatttctacatcattacctacctctttctgaagactcgttcctgcagcatgctgcacaaagcactgtccacttgtgcctctcacttcatggttgtcatgattttttatgctcctgttctcttcatctatatcaatcctgattcagggagctccctggaaaaggacaggatcattgctgtcatgtacactgtggtcacccctgcactcaatccacttatctatactctgaggaacaaggaagtgagaggtgctttgaataggaaactcaggatacttctt

SEQ ID NO: 1168 - DNA, 936 bp, Mus musculus
  MOR256-48
atgatattggtcaataaaagtcacccagaagagtttattctacttggttttgcagatcgtccttggctggaacttcctctctttattattcttctggtaacataccccacagccatgattggaaacatcgccatcattctcatgtctatattagacccctgtctccacagccccatgtatttctttctcaccaacctctcctttctggacatgtgctacaccacaagcattgtacctcagatgttaattaacctttggggctctacaaagaccatcagctacttgaggtgtgtagttcagctttatttcttccacacaatgggaggtacagagtgtgtcctcctagctcttatgtcctttgaccgatatgtggccatctgcaaacccctgcactataccctcataatgaatcggcgtaactgcctcctgttagtgtccactgtgtggctgactggaatttcctatgctgtctcagaggccactgtaacactgcaattgcctctatgtggccacaataaaatggatcatttagtgtgtgagattccaattctgataaaaactgcttgtggtgaaaaagagactaatgagcttgctctctctgtaatatgcatttttcttttagctgtccctctgtgtttaattcttgcctcctatgctagtattggacatgctgtctttaaaatcaaatcaatagaaggaaggaaaaaggcttttgggacatgttcctctcatctcattgtagttctcttgttctatggcccaggtattagtatgtatcttcagcctccctcctctattacaaaagaccaacctaagttcatggctctcttctatggagtagtcactcctacactgaaccccttcatttatactctgagaaataaggatgttaagggggcattaggtaacctattcagaaacatttttattccgaag

SEQ ID NO: 1169 - DNA, 942 bp, Mus musculus
  MOR171-42
atggaggacatgccagcaggaaaccattgcacagtgactgtgttcttcttagctgggctctcagagcagtcagaactccagctgcccctgttcctcttcttcacaggaatctatctgatcactgtgtctgggaatctgggcatgattatactaattgggctcagttccaacctgcacacacccatgtactatttcctcagcagtttgtccttcattgactttggtcagtccacagttgttacccctaaaatgctggtgagctttctgacagagaagaacctcatcacctaccctgaatgcttggctcagctctactttgccatcatttttggcacagcagagagctacacattagctgcaatggcatatgaccgctatgttgccatctgtaaccccttggtttacaatatagccatgtcctctcagatttactgttctctgatttcaggggtatacatttttgctgtgttctgtgcatcagtaaacatgggcttcatgtttaggatccagttctgcaaatcagatgtaatcaaccactatttctgtgatttccttcccctcttgaaacttgcatgctctaatacatatgtcagtgaaatgttgattctattttttggtacactgaatatctttgtcccaatgctgaccattattacttcctacatctccattatttccagcatcctccgcattagctctagtgagggcaggtccaaagcctttagtacttgcagttcccacatctctgctgttgctgtcttctatggttctacagcatttgtgtacttacagccatcacgagtaagttcaatagaccaagggaaagtgtcctctgtgttttatacgactgttgttcccatgctgaaccccttgatctacagcctgaggaataaggatgtcagtgttgcaatgaagaaaatacttgaaaggaaaagattcatg

SEQ ID NO: 1170 - DNA, 937 bp, Mus musculus
  MOR171-43
atggaggacatggcagcaggaaaccagtgcacagtggctgagttcttcttggctgggctctcagagaagccagaactccagctgccactcttcctcctcttcacaggaatctatcactgtagcagggaacctgggcatgatcacactgattgggctcagttcccacttgcacacacccatgtactatttcctcagcagtctgtccttcattgacttctgtcagtccacagttatcacccctaaaatgttggtgagctttctgacagagaagaacatcatcttttactctggatgcatggctcagctctacttcttcatcatttttggcgttgcagagtgctacacattagctgcaatggcatatgaccgctatgttgccatctgtaatcccttgctttacagtgtatccatgtcttatcagatttacagttctctgatttcaggagtgtatatttttgctgtggtttgctcttcagtaatcactggctttatgcttaggattcagttctgcaagttagatgtgatcaaccactatttctgtgatcttcttccactcttgaaacttgcacgctctaatacctatatcaatgaaatgttgacattatttgttagtatgtttaatatctgtgtcccagtgatgaccattattacttcctacattttcattatagccaccattctcaacattcactccagggagggcaagttcaaggcttttagtacctgcagttcacacatctctgctgttgccattttctatggttctggtgcattcatgtacttacaaccatcatcagtgagttcaatggaccaagggaaagtgtcctctgtgttttatactactgttgttcccatgctgaaccccttgatctacagcctgaggaataaagatgtcagtgttgcattgaagaaaatacttgaaaggaaaaaagtcatg

SEQ ID NO: 1171 - DNA, 939 bp, Mus musculus
  MOR224-9
atggagataaaaaactgctcagtggtgactgagttcatcctcctggggatcccacacacagagggctttgagactctgctttttgtgttattcctgcccttctatgcctgtaccctagtgggaaatgtatctatccttgtggctgttatttcctcaactcgccttcatacacccatgtattttttcctggggaacttgtccgtatttgatatgggtttctcttctgtgacctgtccaaaaatgctcttttaccttatgggacttagcagacttatctcctaccaagactgtgtctcccagctcttcttctttcattttcttgggagcattgagtgctttctgtatacagtgatggcctatgaccgctttgctgccatttgtcaccctcttcggtactcggtcatcatgaactctaagatctgtgtggctctagctgtgggcacatggctattaggatgtttccactccagcgtcttaacttccctcaccttcactttgccttactgtggtcccaatgaagtagaccacttcttctgtgacataccagccatcttgccattggcgtctgctgatacctccttagcacagagagtgagcttcactaatgttggtctagtgtcccttgtctgctttctcctgatccttctgtcctatacacgaatcacaatctccatcttgagtattcagtcaactgaggggcgtcagcgtgccttctccacctgcagtgcccacctcattgctatcctctgtgcctatggacctataatcactatatacctacagcctacaccaaaccccatgctgggaactgtcgtgcaaattctgatgaacttggtaggtccaatgctgaaccctttgatctatactttgaggaataaggaagtaaagatagccctgaaaaagatactgcatgggaaggggtcagtttctgagggttag

SEQ ID NO: 1172 - DNA, 942 bp, Mus musculus
  MOR13-6
atgagaaccttgtacagtaacacctcaagcaccttaagcttcatgctgacgggcttcccagagatgcagagtctggagcactggctggctgccctcctgctgctgctgtatgttatctccatagtaggcaatgccctgattctcttcatcataaaggaggaacagagtttgcaccatcctatgtactacttcttgtcccttctgtctgtcaacgacctgggagtgtctttttctacattgccaacggtgcttgcttctatgtgttttcatatcccagagactgccttcgatgcttgcctggcccagatgttcttcatacactttttttcctggacagagtctgggattctactggctatgagttttgaccggtacgtggctatctgtaaccctttgcattattcctcagtgcttactgatgcccgtgtggcccacatgggtatgtccatcatcatccgcagtttctgcatggtcttcccacttcctttcctactgaagaggctacccttctgtaaggccaatgttctgacccattcctactgcttacacccagacctgatacgcttgccctgtggagataccaccatcaacagcatgtatgggctgttcattgtcatctctgcttttggtgtagactcagtgctcatcctcctctcctatgtgctcattctgcgctctgtgctggccattgcctccagggaagaaaggcttaagacactcaacacatgtgtatcacatatctctgctgtgctcatcttctatgtacccatgattagtgtgtcaatggtccatagatttgtaaaacatgcgccagagtatgtgcacaagttcacatccctggtctatctctttgtgcctccaatgctcaatcctattatctattccatcaagacaaaggagattcgtaggagactgcacaagatgttactgggtaccaagttc

SEQ ID NO: 1173 - DNA, 972 bp, Mus musculus
  MOR34-10P
ctcattatatcacttctaaatgccagcagtctgactccagcttcattcatcctcaatggcatccctggtctggaagaggttcatttgtggatctccttcccactatttaccatgtacagcattgctcttacaggaaaatttgggcttatatatcttatctattctgaagaggtcttacacagacctatgtacatcttcctagcccttctttccttcacagatgtgctcatgtgcaccagcacccttcccaacactctctgcatattgtggttcaatgtcaagaagattgactttaaggcctgcctggctcagatgttctttgtgcacactttcacaggaatggagtctggagtgctgatgctcatggccttggaccgctatgtggctatctgttatcctctgcgctatgccactattctcactaatgtggtcattgccaaggcagggatgcttacttttcttaggggagtgattcttgtcatccctttcatattccttaccaagcgcctgccatactgcaagggtaatgtcatcccccacacttactgtgaccacatgtctgttgctaaaatatcctgcggcaatgttcaaatcaatgccatctatggtctaatggttgccctcctgattgggggctttgacatcctgtgtatcacagtctcctacaccatgatcctacgggcagttgtgagtctgtcatctgcagatgctcgacagaaggctttcagcacctgcactgctcatatctgtgccatcgtcatcacatatgtcccagccttcttcaccttctttacacaccgctttgggcggcataccatccctccccacatacatatcatcatggctaatctctatctgctcatgccgcccaccatgaacccaatagtgtatggggtgaaaaccaagcagatatgagagagtgtcattaggttcttgtttaaagggagagaaaattcttcccataaaatttaa

SEQ ID NO: 1174 - DNA, 951 bp, Mus musculus
  MOR249-2
atggaaggaaagaatcaaacagctccatctgaattcatcatcttggggttcgaccacctgaatgaattgcagtatttactcttcaccatcttctttctgacctacatatgcactttaggaggcaatgtttttatcattgtggtgaccatagctgattcccacctacacacacccatgtattatttcctaggaaatcttgcccttattgacatctgctacactactactaatgtcccccagatgatggtgcatcttctgtcagagaagaaaatcatttcctatggaggctgtgtgacccagctctttgcattcattttctttgttggctcagagtgtctcctcctggcagcaatggcatatgatcgatatattgctatctgtaagccgttaaggtactcatttattatgaacaaggctctgtgcagctggttagcagcttcatgctggacaggtgggtttctcaactcagtgttgcacacggttttgaccttccacctgcccttttgtggtaacaatcagatcaattatttcttctgtgacatacctcccttgctcatcttgtcttgtggtgatacttccctcaatgaactggctttgctgtccattgggatcctcataggctggactcctttcctgtgcatcatcctttcctacctttacatcatctccaccatcctgaggatccgttcctctgaggggaggcacaaagccttttccacctgtgcctcccacctgctcattgttattctctattatggcagtgctatcttcacgtatgtgaggcccatctcatcttactctctagagaaagatagattgatctcagtgctgtatagtgttgtcacacccatgctgaatcctgtaatttatacgctaaggaataaggacatcaaagaggctatgaaggccatagggagaaagtggaagccaccagttttctcttctgatata

SEQ ID NO: 1175 - DNA, 990 bp, Mus musculus
  MOR263-9
atgacttactgttctgtcttccaggagatgagtgtcaactgctctctgtggcaggagaacagcttgtctgtcaaacgctttgcatttgccaagttctctgaggtccctggagaatgcttcctcctgtttaccctcatcctcctcatgttcttagtatcactgacaggaaatgcactcataacccttgccatctgcaccagtccagccctacacactcccatgtacttctttctggccaacttgtctctcctggagattggctacacttgtactgtcataccgaagatgttgcagagccttgtgagtgaggcccgagggatctctcgggagggatgtgccacacagatgtttttcttcacactatttggtataactgagtgctgcctactggcagccatggcctttgaccgctgcatggccatatgctccccactccactatacaacccgaatgaatcgtggggtatgtgcccatttggcaatagtttcatggggaacaggttgcattgtagggttgggacaaaccaattttattttctccttaaacttctgtggcccctgtgagatagaccacttcttctgtgaccttccacctgtcctggcacttgcctgtggagatacatcccaaaatgaggctgccatctttgtggtagccatcctctgtatttctagtccatttttactcatcatttattcctatgtccgaattctggttgcagtgctggtgatgccttcacccgaggggcgccataaagctttctctacctgttcttcccatctacttgtagtcacactgttttttggctcaggatctattaactacttgaggcccaagtctagccactcaccaggaatggacaaactcttggcccttttctacacagcggtgacttccatgctgaaccccatcatctatagcttaaggaacaaggaagtgaaggcagcactgagaagaactctgggcctgaagaaagttctgactatgaatagg

SEQ ID NO: 1176 - DNA, 942 bp, Mus musculus
  MOR171-44
atggaggacatgacttcaggaaacaactgcacagtgactgaattcttcttggctgggctctcagaggaaccagaactccagctgccactcttcctgctcttcacaggaatatatctgatcactgtggcagggaacctgggcatgatcacactgattgggatcagttcccacctgcacacacccatgtattatttcctcagcagtctctccttgattgacttctgtcagtccacagtggttattcctaaaatgctcatgagcttcctggtggagaagaacctcatttcttaccctggatgcatggctcagctctacttcttcatcacttttggcattgcagagtgctacacattagctgcaatggcatatgatcgctatgttgccatctgtaaccccttgctttacaatgcaactatgtcctctcagatttatacttccctgattttaggggtgtatatttttgctgtgatctgtgcatctgtaaacacaggcttcatgagtaggattaagttctgcaaatcagatgtgatcagccactatttctgtgattttcttcccctcttgaagcttgcatgttctgatatctatatcaatgaaatgttgattttgtcttttggtacagtgaatatctgtgtcccattgctaacggttattacttcctacatcttcatcattgccagcatcctccgtattcgctccagtgagggcaggtctaaagccttcagtacttgcagttcccacatctctgctgttgctgtcttctatggttctgctgcattcacatacttacagccatcatcagtgagtttgatagaccaagggaaagtgtcctctgtgttttatactactgttgtacccatgctgaaccccttgatctacagcctgaggaataaggatgttacagttgcactgaaaaccatacttgaaagaaaaaaattcatg

SEQ ID NO: 1177 - DNA, 951 bp, Mus musculus
  MOR25-1
atgtccacttttcataatgtatgttcagtacccagctctttgtggctcaccggcatcccaggactggagaccttgcacatatggctctccattccctttggctccatgtacctggtggctgtggtggggaacatcaccatcctagctgtggtaagggtagagcgcagcctgcaccagcccatgtacttctttctgtgcatgctggctgtcattgacctggttctgtctacttctactatgcccaaacttctggcgattttctggtttggtgctggccacattggcctggatgcctgcttatgccaaatgtttcttatccattgctttgctactgttgagtcgggcattttccttgccatggcttttgaccgctatgtagccatctgcaatccactgcgtcacagcatggtgctcactcacacattggtgggtcgtttggggctggctgccgtcctcagaggagttctttacattggacccctaccacttatgatccgcctgcggttgcctctttacaaaacccgagtcatctcccattcctactgtgagcacatggctgtggttgccttgacctgtggtgacagcagagttaacaatgtctatggcttgagcattggctttctggtgttgatcctggattcagcggccattgctgcctcctatgtgatgattttcagggctgtgatggggctggccactcccgaggctagacttaaagctctggggacatgtgggtctcatatctgcgccattctgattttctatgttcccattgctgtttcttctcttattcaccggtttggtcaccaggttcctcctccaatccacactctgctggccaacttctatctcctcattccccctatcctcaatcccattgtctatgctgttcgtaccaagcagatccgggacaggcttcttcagatcctaaagacaggaaccaagatcaga

SEQ ID NO: 1178 - DNA, 927 bp, Mus musculus
  MOR33-3P
atagaactcaacactacacctactcagctcactttctttctgcttactggtgtgccaggattagaagatattcagatttggatgtccatacctttcagcttcatgtacgttttggctgtgttaggaaatgtgctggtcatggcagtagtggtctatgacaggagcctccatgaacccatgtatctcttcctggccatgttggcattcaatgatgtcctcctctgtactgtcacggtaccccaaatgctgctcattttctggcagggccccttggaagccacattccctgcatgcctgacacagatgttttttgtccatgctctgttcctctctgaatctgctgtcttactggctatggcttttgatcgctatgtggctatctgcattccactgcattatacatccctgcttacaagctctatcattggcaaggttgggctggtgctgatagctcgaagtgtggctgttgttactccaggtgttctacttattctccgcttggacttttgccgaagcaacattatccatcacacatactgtgagaacatgggcattgccaagttggcttgcaacagctttaccttaaatagcatttatggtctctcagctgctcttctcacgacagggctggactttgtctttatctccttgtcctactggctaatcttgaaaactgttctacaactgccatcaaaagaagcacggacaaaagcctttggcacctgcggagctcacatttgcgtcattttaatattctacacactggcctttttctctttctttacccatcgctttgggcaccatgtgtccaggcacactctcatcctcctggcaaatctctatctactgatacccccaaccatgaaccccattgtttatggaataaagaccaaagagataaggatgcgagtagtaggaacctgttct

SEQ ID NO: 1179 - DNA, 987 bp, Mus musculus
  MOR108-4
atgttgattttatcagttagatttcttgtagacaaaccatcagagatgaggaacagaacttcagtgacatacttcatcctcctgggtctgacagacgatcctgagcttcaggttgtgattttcttttttctgtttctcacttacttgctgagcattactggaaatttaaccatcattactctcacactgttggattcccacctgaagacacccatgtatttcttcctcaggaatttctccttcttagaaatctcatttacttctgtctgtaatcctaggtttttggtcagcatcttaactaaggacaaatcgatctcctataatgcttgtgctgcccaactatttttctttatcttccttggctcaacagagtttttccttctggcatccatgtcctatgatcgctatgtggctatttgcaagcctctgcactatacgaccatcatcagtaacaagatctgccaccagctcatcatcagctcctggctggctggtttcttggtagtttttcctccactggccatgggcttagatctagatttctgtgactccaacactattgaccacttcacatgtgactctgctcctttgctgcaaatatcctgcacagacacaagcaccttggagcttatgagctttatattagctttgatcacacttatgaccacgctgatgctgataattctctcttacacctgtattctcagaactattctgaaatttccctcagccaaacaaagggaaaaggccttctcaacctgctcctcacacatgattgttgtctctatatcctatggaagctgcatcttcatgtatgtgaaaacatctgccaaggctggagttgctttaacaaagggggtggctatgctcaacacctctgttgctcccatgctgaatccttttatttacactttaaggaaccagcaggtgaaacaagcatttaaggatctcgtgcgaaaaaaacttgcttcaaaactgctgatctga

SEQ ID NO: 1180 - DNA, 933 bp, Mus musculus
  MOR233-18
atgcaaaaccagagttttgtaactgaatttgtcttcctgggactttcccagaatccaaatcttcaaaaactaatatttattatatgtctagttgtttacattgcaactatggggagcaacatgatgattgtggtgactgttgtctgtagccctacactgctgggctctcccatgtatttcttcctggcttttctgtctttattggatgcaagcttctcctctgccatgacacccaagatgattttagactctctctacaagagaaaaaccatctcctttgaaggatgcatgatacaactttttgttgaacacttcttgggtggggctgagatgattcttctgacagccatggcctatgaccgctatgttgctatttgtaagcccttacactactcttccatcatgaccaggaaggtctgtggcacgctggtgggggtggcctgggcaggaggattgttacattctactgtgcaaattatcttcactttgcagttaccattttgtggacccaatgtcattaatcatttcatgtgcgacttatttccattactggagcttgcctgcaccgacactcacatctttggcctttttgtggtggccaacagtgggttgatctgtattatagtctttgttttgttgcttgtctcctatggctttatcttgctgtctttgagatcccagagttctgaagggcgatggaaagctctgtctacttgtgggtcccacgttgctgttgtggtcttgttctttgtcccatgtatatttatatatgcaaggcctcacagtgctttctcctttgacaaaatggtagcattattttacaccatgctatcccccttgcttaatcctatcatttacacttttaggaataaggacatgaaaaatgccataaggaaattgtggaagaaattggtaatggtttcagatgaaaga

SEQ ID NO: 1181 - DNA, 914 bp, Mus musculus
  variation (36)...(73): MOR233-19; Any nucleotide A, C, G or T
atgcaaaaccagagttttataacggaatttgtcttnnnnnnnnnnnnnnnnnnnnnnnnnnnnnnnnnnnnnntgtctacattgcaactattgggggcaatatgatgattgtggtgactgttgtttgtactccggcactgctcggctcacccatgtatttcttcctggccttcttgtctctattggatgcaagcttctcctctgccatgacacccaaaatgattgtagattctctctatgagagaaaaaccatctcctttgaaggatgcatgatacaactttttgctgaacatttctttggaggggctgaggtgattgtcctgtcagccatggcctatgaccgctatgttgctatttgcaagcccttgcactactcttccatcatgaccctgaggctctgtggtactctagtgggagtggcctggacaggaggattcttacactctatcatccaaattatcttcactttgcagctgcctttctgtggacccaatatcattgatcacttcatatgtgacttgtacccattactggaacttgcttgcactgacactcacatctttggccttttggtggttgccaacagtggctttatctgcatcataatcttcactttgttgcttgtctcttatggttttatcttgctgtctctgagatctcatagttctgaaggacgatggaaagctctatccacttgtggatcccatattgctgttgtggtcttgttctttgttccatgcatatttacatatgcaaggcctcccactgccttttcctttgacaaaatggtagcaatattttacaccatgctatcccccttgcttaatcctatgatttatacttttaggaataaggacatgaaaaatgccataaggaaaatgtggacgagattgatagtacattcagataaaaaa

SEQ ID NO: 1182 - DNA, 939 bp, Mus musculus
  MOR133-5P
atgggaagagagaaccagacaagcacctttgagttcctcctctggggactctcagagcagctacagcaacaacacatcctcttcctgatcttcctgtggatgtaccttgtcacagtagttgggaatctgctcattgtcctggccattagcactgatgtacgactccacacacccatgtacttcttgcttgccaacctgtcctgtgatgatatcctcttcacctccaccacaatacccaaggccctagtgaacatccacacccaaagcaggaccatctcctatgcaggatgcctggtccagctctattttttcctgacttttggagacatggacatcttcctcctggccacaatggcctatgatcgctttgtggctatttgtcaccctctccactataggatgatcatgagcttccagcgctgctcactcttagtgacagcctgttggatccttacaacctttgttgctatgacacacaccttgctcatattccggctctccttctgctctaagaaggtcattccagacttcttctgtgacctgggacccctaatgaagatcgcttgctctgaaacccggatcaatgagcttgtgcttctcttcctgggaggtgcagtcatcttaatccccttcttgctcatccttgtgtcttatatccgcattgtttcagccatcctcaggctcccttctgcccaaggaaggcgtaaggccttttctacctgtgggtcccacctttctgtggtggccctgtgctttgggacagtgataaaggcttatctatgtccctcatcctcttcctccaactcagtggtagaggatacagcagctgttgtcatgtatacagtggtgactcccctactgaaccccttcatttacagcctgtgaaacaaagacatgaagggagcactggtcagaattctcaagggcaaagtctccttc

SEQ ID NO: 1183 - DNA, 924 bp, Mus musculus
  MOR183-8
atggagaagaatgccaccctgctgacagagtttgttctcacaggactcagtcaccagccactgtggaacatccctctgttcctggtcttcttggtgatctatctcatcaccattgtgggaaacgtcagtttgatcactctcatctggactgaccctcacctccatatccccatgtatctgtttcttggaagcttggcttttgtagatacatctatttcttccatagtggtcccaaagatgcttcttaacttctttggtaagagcaaggtgatcactctctctgaatgtatggcacaattttttttatttaatatcagtgcaaccacagagtgtttcctcttggcagcgatggcctatgatcgctatgtagccatatgcaaacctttactctacccagtagttatgaccaatggtctgtgtgtatggctaatagccttgtcttttgttgctggaattattcatgctttgattcatgaaggttttttattgagattaaccttctgtaattccaacatgatacataacttttattgtgacattatatcattgttaaagatttcctgtactgacacttctcttaattacctaattgtttttattttctctggctcgatccaggttttcactatttcaactatccttgtctcttacactattattttgtttacaatcttaaaaaagaaatctgccaaaggcataaagaaagccttctccacctgtggggcccatctcctatccgtgtctttatactatgggccccttctcttcatgtatgtgcaccctgcatcttcagaagtagatgatcaagacatgatagactctctgttttacactgtcataattcctgtgttaaatccaattatttacagtttgagaaataagcaagttatagattcactggcaaaatttttaaagagaaatgtt

SEQ ID NO: 1184 - DNA, 927 bp, Mus musculus
  MOR183-9
atggaagacgggaatacaacattgctgacagagtttgttctcacagggctcacagatcatcaagggctgcaggtgcccctgttcctactattcttgatgatatatctcatcactgttgtggggaacctaggtctgattgctctcatctggagtgacccccacctgcatatccctatgtaccttttccttgggagtttggcttttgtagatgcctggatatcatccgcagtgactcctaatatgttgtttgacttgttatccaagaacaagatgatatcactttccgagtgcatgatacaattttttgccttcgcatttggcgggaccacagaatgctttcttttgggtacaatggcctatgatcgctatgtagccatatgcaaaccattactttatccagttattatgaccaatagactatgcatccgcctactagtttcagtattcataggtggctttcttcattccttgtttcatgtattgtttttactcagattaaccttctgtaattctaacataatccatcacttttattgtgatattataccattgtataatatttcctgtactgatcctactcttaatctcctattagtatttattttgtctggttcaatacaggtattcaccattatgactgttctggtttcatatacactcgtactgttcacaattttaaaaatgaagtctctccaaggtataaggaaggccttctccacctgtggagcccatctcttatctgtgtctttatactatgggccccttctcttcatgtatgtgcttcctgcatctcaacaaacagatggtcaaggtatgatggactctctgttttacacggtcataattcctgtgctaaacccaattatctacagcctgagaaacaagcaggtcacagattcactgaaaaaaagattagagaggcatgtt

SEQ ID NO: 1185 - DNA, 978 bp, Mus musculus
  MOR264-19
atgactcagactccgactaaatcctttctacagatgaaacatgatgaaattgaggcagaagtcaacatttctacagtgatacaatttgttctgctgggattctctgctcttcccaatctccaagggattctgtctgcactgttctccatcatttatatgattatcctcaccggcaattgcctcattatattaataactaggcttgaccatacattgcataaacccatgtatttttttctggcaaatttttcctctctggaaatctgttatgtatcagtgactgtcccaagaattcttttcaacatttggacacaggatagaaacatttctgtgctggcttgtgctgtgcagatgtgtttttttcttatgttgggaactgatgaatgtttccttctggctgtgatgtcctatgatcgctatgtggccatttgcaaccctttgcactatcctttgatcatgaactcaaaaaagtgcactcagttggcagcaggctcctggctaagtggcattccaattcagattggacaaacctgttggatattttctatgcatttctgtgattccaatgaaatagaccacttcttttgtgacataccaccaattctcaagctggcatgtggggacacttcagtgcatgaattgtctgtctatgtggttgttatggtggtggctgcattcccctttatactggtgcttacatcctacagcaaaatcattgccaccatcttgaggttgccaacagccaaagggcgggcaaaagccttctccacttgttcttcccacctcctggtggtggttttgttttatgggtctggcaccattacatacttgaggccaaagtctacgcattcccctggaattgataaattgctgtctctgttctataccattgtgactcccatgttcaatcccttaatatacagccttaggaacaaggaggtggttgttgctctaagaaaactcatactccaaaaatag

SEQ ID NO: 1186 - DNA, 855 bp, Mus musculus
  MOR204-33P
atggagcctgggaaccacacaatggtaacagagttcattattttggggctaactgagaaccccaccctttgttgtatcttctttgtgttgttcctgggtgtctacctcaccaccatattgggcaatgtcagcataatcatgttgatcagaagaagccctcagcttcacaccccaatgtacctcttccttagccacttggcctttgtggacattgggtactccagctcagtcacacctgtcatgattgtgagtttcctgagagagagaactgccatccctgtggctggctgcatagtccagcttggctctgatgtggtctttgggactgctgagtgcttcctgttggctgccatggcctatgatcgctatgtagccatctgctcacccctgctctactccactctcatgtctcccaaggtctgcctcatcttattggttatttcctatgtgggtggatgtgtaaattcttcatcattcaccagctgtttgctgagtctgactttttgtggaccaaataaagtcaaccatttcttctgtgacctcccaccactggtggagctgtcctgtacccatgtttatgttgctgaaatgtctcctgccatctcagcaggctccatcatcgtcatcaccctgttcgtaatcattatttcatatgtctacatccttcactccatcctcaggatgcgctctactgagggcaggcacaaggccttctccacctgcacctcccacctcactgcagtcaccttgttttatgggacagttacatttgtttatgtcataccagaatcaagccattcaccaaacaaaattaaagtggtgtctgtgttctacacagtggtgatccccatgctg

SEQ ID NO: 1187 - DNA, 939 bp, Mus musculus
  MOR110-9
atgaagaaccaatcagtgaagatagagttcattttgcttggactgacagatgaccctcagctacaaattcttgttttcctgtttctgttttttaattacatcttaagtgtgatgggaaacttagtgatcatacttctcaccctgctggatccccatctcaagactccaatgtatttctttcttcggaatttctctttcttagaaattgcgttcactacagtgtgcattcccaggttccttatgagcattctctcaggagacagaacaatttcctacaatgcttgtgcagctcaattattcttttttttcttactaggggccacagagttctacctcctggctgccatgtcctatgatcgctatgtagctatctgcagaccactgcactaccccatcatcatgaatagcaaagtgtgccaccttctggtcctcagctgctgggtgactgggttcttagtcatctttccccctttgctcttgggactcaaactggatttctgtgcctccaaaacaatagaccacttcctatgtgacacttcccctgttctgcagctgtcttgcacagacacacatttcatagaattgatggcttttgccttagctgtcatgacacttgtcattaccttgatcttagtgattctctcctacatactcatcatcaaaaccattctaaagttcccttcagctcaacagaggagaaaggccttttctacttgttcctcccacatggttgttgtctccattacttatgggagttgtatcttcatgtatatgaaaacatcagccaaggagagggtgaccttaaataaaggtgtagctgtgcttaatactgttattaaacgcgttctcacgcccggccaggaagaacacaacaaaccagaatcttctgcggcaaagctttattgcttacatcttcaggagcaggagtgcaagaagcaa

SEQ ID NO: 1188 - DNA, 972 bp, Mus musculus
  MOR246-2
atgaatgaaacaaattactctcgtgtgacagagtttgtgctgttgggtctgtctagttcaaaggagctccagcctttcctgtttctcatattttcactgctgtacctagcaatactgctgggcaactttctcatcatcctcacagtgacttcagacccacgacttcatacacccatgtacttcctgcttgcaaacctatcttttatagatatgtgtgtagcctcttttgctacccccaaaatgcttgctgactttctggttgaacgaaaaacaatatcttttgaagcctgcttggctcagattttctttgttcatctctttactggtggtgaaatggtacttcttgtatccatggcctatgatcgctatgttgcaatatgcaagcctctccactacatgacaatcatgagtcgccgtgtatgtatcattctcgtctgcatttcctggtttgtgggtttcatccatacaactagtcagttggcattcactgttaacttgccattttgtggtcctaacaaagtagacagttttttctgtgatctcctactggtgaccaagctagcttgcatagacacttatgttgtgagcttgctaatagttgcagatagtggatttctatccatgagttcatttctcctcttggttgtctcctacactgtgattctcattactgttaggaatcgttcctctgctagcatggccaaggctcgatccaccctaactgctcacatcactgtagttgtactattttttggaccatgcatcttcatctatgtgtggccctttagcagctattcagttgacaaagtccttgctgtgttctacaccatcttcacacccattttaaacccagttatctacactctgagaaacaaagaggtgaaagcagcaatgtcaaagctgaggggtcgctatctgaaacctggacaggtttctgcattgataagaaatgttcttttcctggaaacaaag

SEQ ID NO: 1189 - DNA, 927 bp, Mus musculus
  MOR115-4
atgaaaaataaaacttcattgactgaattcatccttctaggactcacggatgtccctgaacttcaggtggcagttttcacttttcttcttcttgcctatgtattcagcatgattggaaacctgaccatcctcgtcctcaccctgctggattcgcaccttcacactcccatgtatttcttcctccggaacttctccttcctagaaatttctttcacaaacatcttcatccccagggtcctggtcagcattacaacgggaaacaagagtattagctttgctggctgctttgctcagtatttctttgccatctttcttggagcaacagagttttatctcctggctgctatgtcctatgatcgctatgtggccatatgcaaacccctgcactacatggcaatcatgagcaacagagtctgtacccatctggttctctgctcttggctaggtgggttgatggccattatacctcccatcactttgatgagtcagcagaacttctgtgcatccaacaggctaaatcattatttctgtgactttgagcctcttctagaactctcctgttctgacacaagcctcattgaaaaagttgtctttcttgtggcatctgtgaccctggtggtgactctaatgctggtaactctctcctatacattcatcatcaagacaattctcaagctcccttcagcccagcaaaggacaaaggctttttccacgtgttcttcccacatgattgtcatctccctctcttatgggagctgcttcttcatgtatgttaagccttcagcaaaagtagggggcacattcgataaaggagtagcccttctcattacttcagttgctcctttattgaatcccttcatttataccttaaggaaccaacaggtgaagcaagcattcaaagatacagtcaaaaagcttgtgaatctt

SEQ ID NO: 1190 - DNA, 963 bp, Mus musculus
  MOR246-3
atgaatgaaagaaattactctcatgtgacagagtttgtgctgttgggtctgtctagttcaaaggagctccagcctttcctgtttctcatattttcactgctgtacctagcaatactgctgggcaacttcctcatcatcctcacagtgacttcagacccacgacttcatacccccatgtacttcctgcttgcaaacctatcttttatagatatgtgtgtagcctcttttgctacccctaaaatgcttgctgactttctggttgaacgaaaaactatatcttttaaagcctgcttggctcagattttctgtatccatctatttggtggtggtgagatggtacttcttgtatccatggcctatgatcgctatgttgcaatatgcaagcccctccactacatgacaatcatgagtcgccgtgtgtgtatcactctggtcatcatgccctggtttgtgggtttcatccatacaactagtcagttggcattcactgttaacttgccattttgtggtcctaaccaggtggacagttttttctgtgatcttccactggtgaccaagctagcttgcacagacacttattttgtcagcttactaatagttgcagacagtggagttctcaccctgagtacatttgtcttcttggtcatctcctacactgtggttttaattactgttaggaatcgctcctctgctagcatggccaaggcccgatccaccctaactgctcacattattgtagttgtacttttctttggaccatgcattttcgtttatgcatgtcccttaaatggctcttcagttgacaaagtacttgctgtgttctacaccatcttcacgcccattttaaacccacttatctacactctgagaaacaaagacatgaaagcagctatgtcaaagctgaggggtcagtatatgaaacccaggcaggtttttgaactggtaagaaatgttctctttctg

SEQ ID NO: 1191 - DNA, 963 bp, Mus musculus
  MOR246-4
atgaatgaaagaaattactctcgtgtgacagagtttgtgctgttgggtctgtctagttcaaaggagctccagcctttcctgtttctcatattttcactgttgtatctagcaatactgctgggcaacttcctcatcatcctcacagtgacttcagacccacgacttcatacacccatgtacttcctgcttgcaaacctatcttttatagatatgtgtgtagcctcttttgctacccccaaaatgcttgctgactttctggttgaacgaaaaacaatatcttttgaagcctgcttggctcagattttctgtgtccatcaatttgctggtggtgaaatggtacttcttgtatccatggcctatgatcgctatgttgcaatatgtaagcccctccactacatgacgatcatgagtcgccgtgtgtgtatcactctggtcatcatcccctggtttgtgggtttcatccatacaatgagtcagttggcattcactgttaacttgccattttgtggtcctaaccaggtggacagttttttctgtgatctcccactggtgaccaagctagcttgcacagacacttattttgtcagcttactaatagttgcagacagtggagttctcaccctgagtacatttgtcttcttggtcatctcctacactgtgattctcattactgttaggaatcgttcctctgctagcatggccaaggcccgatccaccctaactgctcacatcactgtagttgtactattctttggaccatgcatttttatctatgcatggccctttaatggctattcagttgacaaagtccttgctgtgttctacaccatcttcacacctattttaaacccacttatctacactctgagaaacaaagaggtgaaagcagctatgtcaaagctgaggggtcgctatctgaagcctggacaagtttctgaattaataagaaatgttctttttatg

SEQ ID NO: 1192 - DNA, 948 bp, Mus musculus
  MOR278-2
atggacagagggaacaccacagcgggcttcgtcctcctaggactctttaaccacaccagggcccacttattcctctttgtgttggttctgactgtggccttcaactctgtggtaggcaacgccctcctgcttctccttattcaccaggaccgccggctccacacacccatgtactttctcctgagccaactctccctcatggacatgatgctggtctccacagtagtgcctcaaatggcagctggctatttaatgggtaagaagttcatctctgccgctggctgtggcttccagatcttcttcttcctcacgctgggaggtggagagtgcttcctcttagcagccatgtcctatgaccgctatgtggctatatgccacccattgcgctatccggttctcatgagctggcagttatgtttgagactaaccgtggcgtcttggctcctgggagcagctgatggagccatgcaagctgctgccaccctgagcttccagttttgcagccggaatgaaatagatcacttcttctgtgaggcccctgtgttattgcgcttggcttgcggagacacatcagcctttgagtttttcatgtacatttgctgtgtgttgatgcttctgatccccttctccctcatcctgatgtcctatggtctcatcctggccgctgtcctccgaatgcggtccacagaagcccgcaagaaagccttcgccacctgctcctcgcacttggcggtagtgggcctcttttacggagcggctacttttagctacatgaggcccacatcctccaggtcagcgaaccacgataaggtagtgtcagcattctatactatcgtcacccccatgctgaaccccctcatctacagtcttcggaacagtgaagtcaagggtagcctgaggaagtgcgtgacccgctgtgctgccctaactagtaaggatgccttggct

SEQ ID NO: 1193 - DNA, 948 bp, Mus musculus
  MOR258-5
atgcaggacttcctctggagaaaccgcagctctcttaccgagtttgtccttctaggattctctagtaacacacagataaatggcattctgtttggcatctttcttctcctctacctcaccaccctcctaggcaatgggctcattatcaccttgatacacatggattcccgcctccacacacccatgtactttttcctcagtgtcttatccattctggatatgggctatgtcaccaccacagtgccccagatgctggtacatctggtctgtaagaagaagaccatatcctatgttggatgtgtggctcagatgtacatcttcctgatgctgggaatcaccgagtcttggctgtttgcaatcatggcctatgataggtatgtggccatttgccatcccctcagatacaaagtcatcatgagtcctttgctgcgtgggtcactggtagccttctgtgggttctggggtatcacctgtgccctgatatatactgtttctgctatgattcttccctattgtggccccaatgagatcaaccacttcttctgtgaagtgcctgctgtcctgaagttggcttgtgcagacacctctctcaatgaccaggtagacttcatcctaggctttatccttcttttggtcccactctccctcatcattgttgtctacatcaatatctttgctgctatcttgagaatccgttcaactcaagggaggatcaaggccttctccacctgtgtgtcccacatcactgtggttaccatgttttccatcccgtgtatggttatgtatatgaggcctggctctgagtcctccccagaagaggacaagaagttggctctcttctacaacgtcatctctgccttcctcaaccccatcatctacagccttcgtaataaagatgtgaaaagggctttcctcaaggtagtgggcagcagaaaagggtcagagtga

SEQ ID NO: 1194 - DNA, 936 bp, Mus musculus
  MOR200-1
atgacgagaaacttcacctctgtgactgaattcatcctcctgggtctcactagccatgtggagcttcaaattctcttttttgtgttgtttctagtggtatatgtggtcacagttgcaggcaacctgggcatgatcctgctcatcaaggccaatgccaggctccacacacccatgtactttttcttgagccacttatcctttgtggatatgtgcttctcttccaatgtgaccccaaagatgctccagattttcctgtcagagaggaaaactatttcctactctgcatgcttggtccaatgttacctcttcattgcattggtacatgttgaattctacatcctggctctgatggcctttgatcgttacatggccatctgcaaccctctgctttatggtagcaagatgtcccagagtgtatgcacatctctaatcacagtgccttatgtgtatggggcacttactggtctgatggagaccatgtggacttacaacctggctttctgtggccacaatgaaatcaatcacttctattgtgctgatccaccattgattaagctggcttgttctgacacttatcacaaagaaacctccatgcttgttgtagctggatttaacctctccttctccctgctcattattctcacttcctacctgtatatctttcctgctattctgaggattagctctacagaaggcaagcggaaagctttctccacctgtggctcccatctgacagctgtcatcatattctatgcaactctttttttcatgtatctcagaccaacatctagagagtctgtggaacaaggtaaaatggttgctgtgttctataccactgtcattcccatgttgaaccccatgatttacagcctgaggaacaaagatgtgaaagaagcaataagcaaggaactgtcacacaaaaaaatgtatttttct

SEQ ID NO: 1195 - DNA, 894 bp, Mus musculus
  MOR213-9
ctcttgggattcacctctgaccctaccacacaattggtcctgtttgtgatgtttctcattatgtacacattgagtgtgttaggaaacattactcttattgtgttgatctgcaatgactccaggctccacacacccatgtatttcttcattggaaatctgtcttttctggatctctggttgtctaatgtctatacgccaaagatcttagccatatgtatctctgaaaataagagcatatcctttgctagctgtgtggctcagttcttcttctctgcgggactggactacagtgagtgttacctgctggcggctatggcttatgaccgctatgtggccatctcaaagccactgatttattctcaggccatttctatgaaattatgtgcattttttgtagcagcgtcttatatgggtggctttattaactcttccatcatcaccaagaaaacgtttacctttgatttctgtaatgacaatgtcattgatgactttttttgtgacttgcttcctttggtgaatctggcttgtggtggcaaggaaggataccaggcccttatgtacttcctactgacctccaatgtaatgatacccattgctctaatcctagcctcctatattttcataattgccactatcttgagaatccgttccacccagggtcgcatgaaggccttctctacctgttcctcccacctcatctctgtgactttgtactatggctccattctctacatctactctcgtccccgtaccagatattctttagattcagacaaagttgtttcaacattttacacagtagttttccccatgttgaatcccttcatctacagcctgaggaataaggatgtgaaagaggctatgaataaacttttcaagatcattcctttgtga

SEQ ID NO: 1196 - DNA, 942 bp, Mus musculus
  MOR24-3
atggggccagctaataagtcgcaactctctccaagcaccttctggctgatgggcatcccaggcctagaacaccttcatgtgtggattgggattcccttctgttccatgtacatggtggccctgatggggaatgtgactatcctggccgtggtgagagcagagcgcaccctccacgagcccatgttcctcttcttgtgcatgctgtctgtcactgacctggtcctctccacatccacattgccacgcatgctctgtctcttctggatggcagctcatgatattaccttcgacgcatgccttgctcaaatgttcttcatccacagtttcactgccatggaatctggcttcttcttggccatggccattgatcgctatgtggccatctgtgacccactgcgccatgccacaattctcacccacagccgcatcgccgtgatgggagcagttgtggtgctgcgtggggtaggcttcttctccccacaccctatcctgcttaagcagctgccctactgcagaactcgaatcattgcacacacctactgtgagttcatggctgtggtgaagctggcatgtttggagataggagccaccaagcgttacagccttggtgttgcttttggcatcggctcctgtgattgtttcttcattgccatctcctatgttctgatcctccgtgctgtcttccggctcccatcccgagaagcaagtcttaaagctctaggcacttgtggctcacatgtctgtgtcattgttgtgttctactccacagctgggtttaccttcctgacccaccgttttggccacagtgtggccccccgaactcatattctcatagccaatatgtatttattggttccaccatttcttaaccccattgtttatggtgttaggaccaagaaaattcgagattatgttcttaatactctaaaagtaaaaggcagc

SEQ ID NO: 1197 - DNA, 930 bp, Mus musculus
  MOR161-6
atggccactgaaaatgcctctgtgccagagttcatcctcgcaggcctgacagaccagccaggactccgcatgcccctcttctttctgtttctaggtttctacatggtcaccatggtgggaaacctgggcttgatcaccctgattggactgaactctcacctgcacacccctatgtactttttcctcttcaacttgtcccttatagatttctgctactccactgttattactcccaaaatgctggtgagctttgtctcaaagaaaaacatcatctcctactctggatgcatgacccagctcttcttttttcttttctttgttgtctctgagtccttcatcctatcagcaatggcatatgacaggtatgttgccatctgtaatcctctgatgtacaccgtgaccatgtctccccaggtgtgcttactccttttgctaggtgtgtatgtgatgggatttgctggagccatggcccacacagcattcatggtgaaactgaccttctgtgctgacaagcttgtcaatcactacatgtgtgacattctccctcttctggaacgctcttgcaccagcacctatgtaaatgagctggtagtcttcattgttgtgggcattgatataggggtacccacagtcaccatctttatttcttatgccctcatcctctccagtatccttcgcatcagttccacagagggcaggtccaaggccttcagcacctgcagctcccacataattgcagtttctctcttttttggatcaggggcattcatgtatctcaaaccttcttcccttttgcctatgaaccaggggaaagtgtcgtccttgttttatacaattgtggtgcccatgctcaacccattaatctatagcttaaggaataaggatgtcaaagttgctctgagaaaaacattgagcagaagttcattttcc

SEQ ID NO: 1198 - DNA, 942 bp, Mus musculus
  MOR40-12
atgttccagattctcagagattccagcagctctaggttccaggtgtctgagttcattctcatgggatttccaggtatccacagctggcaacactggctctccctccccctggctctgctctatgtcttggctctcattgccaacatacttattgtgactttcatttaccaagaggcatcactacaccagcctatgtaccatttcctgggcattcttgctattgtggacatgggtctggcaactactatcatgcccaagattttagccatcttatggttcaatgctaaggctatcagtttcaatgagtgctttgctcagatgtatgccatccattgctttgttgccatggagtcagacatctttgtctgcatggctatagataggtatgtggcaattcgcagaccactgagatattcttcaatagttactgaatcttttgtggtcaaagcaactgtgataatggccttcagaaattttgtggctcccatgtcagtacctgtgttggctgctcagagaaattactgttcccggaatcaaatcaaccactgtttttgtcctaacccgggggtcactagccttgcctgtgatgacaggaagatcgacagcattaaccagctcttcctggcatgggcagtcatgggtagtgaccttggtttaattatagtttcttatgctttgattcttccgtctgtgcttaggctgaactccccaaaagctgcatctcaaaccttaagtacctgtacttctcacctcatcctaatctttttcttctacactgttatcattgtcatgcccatcacccacagtgcaaaaatgacagttcctgtcatcctacttctgctgaatgtgccgcacaatgttattccccctgctctgaaccccatggtgtatgctcttaagaacaaagagctcaaagaaggcttttacctgtgctcaggctgg

SEQ ID NO: 1199 - DNA, 960 bp, Mus musculus
  MOR40-13
atgtctgcgtctctcaaagccttcaatagttccaagtcccaggtgtctgagttcatcctgctaggattcccaggcattcacagctggcagcattggctctccctaccatttactttgctctacctttcagcaatagggacaaacgtgctcattctcatcatcatctgtcaggatccttctctgaagcagcccatgtaccttttcttaggtatcctctctgtggtggacatgggccttgccaccaccatcatgcctaagatcctggccatcttctggtttgatgccaaggtcattagccttcctgagtgttttgctcagatctatgccattcactgctttgtaggcatggagtccggtatcttcctctgcatggcttttgacagatatgtagctatttgctatcctctccgctattcatcaattattaccaactccttgatcttaaaagccacactgtttatggtgctgagaaatggcttgtgtgtcattccagtgcctgtgcttgcagcccagcggaattattgttcaagaaatgaaatcgatcattgcctgtgctcaaaccttggagtcacaagcctggcatgtgatgataggaggccaaatagcatttgccagttaatcctggcatgggttggaatggggagtgacctgggtctcataatattgtcatatactttgattctgcgctctgtactcagactcaattcggctgaagctgtttctaaggctctgaacacttgtagctcccacctcatcctcatcctcttcttctatactgttgttgtagtgatttcagtaactcacttgtcagagaccaaggccaccttgatcccagttttgctcaatgtgatgcacaatatcactcctccttcactcaaccctattgtgtatgcacttaggaccagacaactcaggcagggcttccaaaaggtgctttgtcggagcttacaagaaaaataa

SEQ ID NO: 1200 - DNA, 942 bp, Mus musculus
  MOR204-34
atggctttcctggaggatgggaaccacactgtagtcacagagttcattttattgggcttaactgatgacccagttcttagagtcatcctcttcatcatcatcctgtgcatctacctggtgactgtgtctgggaatctaagcaccatccttctcatcagagtctcttcccagctccatcaccccatgtacttttttctgagtcacttggcttccattgacatagccatctcttcttctgtcacaccaaatatggttgtcaacttcctggtggagaggagcagtatatcctacattgggtgtggcatccagcttggctcagctgttttctttggtgctattgaatgtttccttctggctgtcatggcttatgatcgttttgtggcaatctgcaatccactgctttattcaactaaaatgtccaaacaagtgtgtatccaattgcttgtagggtcttatattggtggctttattcatgcttccttctttacactttcctttgtttcttttcttttctgtggaccaaatagaatcaatcactttttctgtgattttactcctttagttgaactctcctgttctgataatagtgtcctcataattcttgattcattttctactggcactattattgtaatcacagtgtttgtcattgctatttcctatacctgcatcctcatcaccatcctgaagatgcattccactgagggtcgacacaaggctttctctacctgcacctcccacctcactgtagtcactctgttatatgggacagtcacatttatttatgtgatgcccaagtccagctactccacagaccagaacaaggtgatatctgtgttctacatggtggtgattcccatgttgaaccccatcatctacagcctcaggaataatgagattaagggtgctctgaagaaacagcttggtgaaaaaaatattttc

SEQ ID NO: 1201 - DNA, 942 bp, Mus musculus
  MOR204-35
atggctttcctgcacaatgggaaccacactgcagtgacagagttcattttattgggattaacagatgacccagtctttagagtcatcctcttcaccatcatcctgtgcatctacctggtgactgtgtctgggaacctcagcaccatccttctcatcagagtctcttcccagctccatcacccaatgtacttttttcttagccacttggcttctgttgacataggctactcatcttctgtcacacccaatatgcttgccaacttcctggtggagaaaaataccatttcctatcttgggtgtaccatccagctcagcttagctgctttttgtggtacagttgaatgcttccttctggctaccatggcttatgatcggtttatggcaatctgtagcccactgctttattcaactaaaatgtccacacaagtctgtatccagttgattgtaggatcttatatagggggttttcttaatgcctcctccttcaccttattctttctttcttttctcttctgtggaccaaatagaatcaatcacttttactgtgattttgctcctttggtggcgctctcctgttctgatgtcagtgtctctgaagtggtaacgtcatttttttctggctcagttactatgatcacaatgttggtcatagccatttcctacacctacatcctcatcaccatcctgaagatgcgctccactgagggccgccacaaggccttctccacctgcacctcccacctcactgcagtcactctgttctatgggaccatcacattcatttatgtgatgcccaagtcgagcttctccactgaccagaacaaggtggtgtctgtgttctacatggttgtgatccccatgttgaacccactcatctacagcctcagaaataatgagattaaggatgctctgaagagacatcttggtaagaaaatattttct

SEQ ID NO: 1202 - DNA, 924 bp, Mus musculus
  MOR179-5
atgaggaacatcacagaagctactttctttgttctcaagggactcacagacaacaatgaacttcagatcattctatttctcctctttctagcaatttacatttttactctgataggaaatgtaggacttattattttagttgttggggattctcagctccacaaccctatgtactgttttctcagtgtgttatcttctgtagatgcctgttattctacagatatcaccccaaatatgctagtaggctttatgtctaaaagcaaaatcatttcattttatggttgtgcaacacagatgtttcttgctgttacatttggaaccacagaatgctttcttttggcagcaatggcttatgaccgatatgtagccattcatgacccacttctgtatgcagtgagcatgtctcctcgagtctatataccacttatcattgcatcctatgctggtggaattgtgcatgctattatccacacagtggccactttcagcctgtctttctgtcggtccaatgaagtcaaacatatattctgtgatataccacctcttcttgctatttcctgctctgaaacttatgtaaatgagctcttgctcttcttcttcgtgagtttcatcgagctagtcaccattctgattgtcctggtctcctatgcttttatcctgttgtcaattctgaagatgaattcatctgaagggagaagaaaagtcttctctacatgtggagctcacctcactgctgtgtccatttattatggcacaatcctcttcatgtatgtaagacctagttccaactattccctggagcatgacatgatagtgtctacattttataccattgggattcccatgctcaaccccatcatctacagtctgagaaacaaagatgtaaaagaggcaatgaaaagagttttgagaaaaaaaattaat

SEQ ID NO: 1203 - DNA, 948 bp, Mus musculus
  MOR259-10
atgtggatgattccagggcagaaccaaagttgggtttctgagttcatcttgattggcttctccagtgaccccacgaccaacagcatcctcttcattgtcttccttctcatgtacctgagctcagtcctgggcaatgggctcatcatcatgctggtctgcctggacacacagctgcacactcccatgtacttcttcctctgtaccctctccctgttggatatgggctatgtcaccaccaccatgccccagatgttggtgcatcttcttgctcactctcagaccatctcctttgctggctgctggctgcagatgtatgtgtttggtgccctgggtatgactgagtgcaccttctttgttgtgatggcttatcaccggtatgtggccatttgctatccactgcgctatactgtcatcctcaactggggcttgtgcatacggttggcaggagggtcttggatatgtggtttattttcttctttgttacatactttcttcaccatgagtctgccatattgtggacccaacaggatcaaccactacttctgtgaaggtccttcagtgcgtagcctggcttgcatggatactcatgtcattgagatggtggactttgtattgagtgtttttgtggttgttattccaatctccctcattgtggcctcctacattggtattgccatggcgattctcaagatcaagtccaaccagggccgttgcaaggctttctctacctgtgcctcccacctgactgtggtcacattcttctatgctccagccagttacatctacatgaggccaaactccagctactcccctgagcgagacaagcagatctcactcttttacaatgtcttcacagccttgctcaaccctgtggtctacagcttgagaaacaaagatatcaagagggcatttctcaaggtgatgggacatggtaggctggcctggtaa

SEQ ID NO: 1204 - DNA, 984 bp, Mus musculus
  variation (867)...(886): Any nucleotide A, C, G or T
  MOR142-1
atggaaagagaaaaccaaacaggagaaagaaactttctcctcctgggattcacagaagactctgacctgcagtccttcttctttgggttgcttctttctatgtacctggtcaccatcacaggcaacttgctcatcattgtggccatcatatctgacccccacctgcacatgcccatgtacttattcctctccaacctgtccatagctgacatcggcttcacctccaccactatccccaaggttctgcagaatatccgcacacaaagcaaattcatctctttctcgggctgcatcacacagatattttttttcattgtgtttggatgcctggacaatttactcctatcagtgatggcctatgaccgctttgtggccatctgccatcccttgcactatgtggtcatcatgaattcttgcttctgtgcgatgctggctcttggatcatggatagtcagcgtcatgagttccctacctgagaccttgactgtgttaagactatccttctgtacaaacatggaaattccacactttttctgtgatcttcccgaagtcctgaagcttgcctgttctgacacccttgttaataacattgtgacatattctataaccatagtcatagctggtttcccattctctgggattctattgtcttattctaagattttctcctccatcctaagaattccttcagctgggggcaagtacaaagccttttctacctgtgggtctcatcttttggtggtcttcttattctatagcaatggtctaggggtctaccttagctctgcagccacatcatcttctagaatgagtctagttgcctcactgatgtacagcatagtcactcccatgctgaaccccttcatnnnnnnnnnnnnnnnnnnnntttttatttattcattgagaatttcatgcatacacacaaatatgatcataaataaaaagtctcagaagtttaaaagagacactgggacaaattgttaa

SEQ ID NO: 1205 - DNA, 954 bp, Mus musculus
  variation (30)...(49): Any nucleotide A, C, G or T
  MOR171-45
tcaatgattatttgggtgtgtttactgaannnnnnnnnnnnnnnnnnnnaaaaagttcagctgcccctttttctcctatttgtagcaatctatctgatcactgtggcaggaaacctggggatgattgcattgattgggatcagttcccacttgcacacacccatgtactatttcctcagcagtctgtccttcattgacttctgtcagtctacagttgttacccctaaaatgttggtgagccttctgacaaagaagaacatcatctcctactctggatgcatggttcagctctacttcttcatcagttttggaactgcagagtgctacacattagctgtaatggcatatgaccgctatgttgccatttgtaaccccctacgttacaatgtaaccatgtcctatcagatttacagttccttgatttcaggggtgtatatttatgctgtgttctgtgcatcagtaaacaccggctttataattaggattcagttctgcaagttaaatgtgatcaaccactatttctgtgatcttcttcccctgttgaaacttgcatgctctaatacctatatcaatgaaatattgattctattttttggttcagtaaacatctgtgtcccaatgctgactgttattacttcctacatcttcatcattgccagcatcctccgtattcgctccagtgagggcaagttcaaagccttcagtacttgcagttcccacatctctgctgttgctatcttgtatggttctactgcattcacatacttacagccttcatcagtgagtttggtggaccaagggaaagtgtcctctgtgttttatactactgttgtacctatgctgaacccattgatctacagcttgaggaataaggatgtcactcttgcattgaaaagaattcttgaacaaaaaaggctttatgtaagcagaagtcgtgtgaagattattaattag

SEQ ID NO: 1206 - DNA, 858 bp, Mus musculus
  MOR170-12
ctgcccttatttgttctgttcttgatgaactacacagctactgtgatgggaaacttgagcttaatgagtctcatttgcttaaactcaaaccttcacacccccatgtactttttcatcttcaatctgtcctttattgacttctgttattcattagtctctactcccaaaatgctaatgagttttcttttagagaagaacaccatctccttcagaggatgcatgactcagctgtttttctactgtgtttttgtgaactctgagagttatgtgctgacagcaatggcctatgatcgctatgttgccatctgtcagccacttatgtacaagatcattatgtcccctaaaatctgttgtctgttgatatttggttctttcttgatggggtttgttagcgccataattcacacaggatgcatggtcaggctcagtttttgtcattctaaaattatcaaccactacatgtgtgacattttccctctccttcaactttcatgcagtagtacttatgtcaatgagcttatgagctatgttgtggtgggcacatctatcattttatgttgcctaattatcttaatttcatatgctatgatcctcttcagtatcattcatatgtcatcaggtaagggttggtccaaagctttgggcacttgtgggtctcacatcataactgttagtctcttttatggatctgggctgcttgcttatgtcaatccgtcatctgctgaaactgtgggtcaggcaaaatttttctcagtgttttatacattattggtgcccatgttgaaccctcttatttatagcctcaggaacaaggatgtcaagcttgctgtgaaaaagacctggaaaagaatcacaagc

SEQ ID NO: 1207 - DNA, 993 bp, Mus musculus
  MOR204-36
atggctttcctagaggatgggaaccacactacagtgacagagtttattttattgggattaactgatgacccagttcttagagacatcctcttcatcatcatcctgtgcatctacctggtgactgtgtctgggaacctcagcaccatccttcttatcagagtctcttcccagctccatcaccccatgtactttattctcagccacttggcttctgttgacataggcatttcatcttctgtcacacccaatatgcttgctaccttcctagtaaaacaaaataccatctcctacattggatgttctattcagtttacctcggctgctttttttgggacagttgaatgcttccttctggctaccatggcttatgatcgatttgtagccatctgcaacccactgctttattccacaaaaatgtccacagaagcctgtatccagttggtggtaggatcttatatacagggttttcttaatgcttcctttttcactctttccttcttttccttgttcttctgtggaccaaatagaatcaatgacttctactgtgattttgctcctttgttggaactctcctgttctgatgtcactgttgctgttgttattacctcaatttctgctggctttatcacactgacaacagtgtttgttatagccatctcctattcctgtattttcatcactattatgaagatgcactccaccgaaagtcgatgcaaggccttctccacctgtacctctcacctcactgcagttattctgttctatggaactgctatattcatttatgtgatgcccaagtccagctactccactgaccagaacaaggtgttgtctatattctacacagttgttattcctatgttgaaccccctcatctatagcctcaggaataatgagattaaggaggctctaaagagacaccttggtaagaaagtattttcttatggtaacctgttttgtaaaactcactataaccacaattacccagtatga

SEQ ID NO: 1208 - DNA, 952 bp, Mus musculus
  MOR32-12
atgactgagagaatgtccctgtataacgtcacagaagtccatccttcttcgttcctcctgctgggcatcccagggcttgaaaatgcacacatctggattggatttcccttttgtttactctatctcattgcagtcctggggaatggtgctgttttatttgtgatccaagctgaacacagtcttcatgagcccatgtactacttcctagccatgttagattccattgacctgggactgaccacagccaccatccccaaaatgctgggcatcttctggttcaatctcagggaaatatcttttggaggttgcctttctcagatgttcttcatccacttcttcacggccatggaaagcattatgttgttggccatgggctttgaccgctacattgccatttgtaagccccttcaatatactgtcattctcaccaacaaagtcattggggtcattgcaggtattgcagtgctgcggagcctctacatggttcttccactggtgtttctcctactgaggctaccctactgtggccatcaaagcattcctcatacttactgtgagcacatgggcattgcccgtctagcttgtgccagcatcaaagtcaacatcatgtttggtcttagcaacattgctctcttgctcctggatgtagttcttattattctctcctatgtcaggatcctctatgcagtgttctgcctgccctcccgggaggccaggctcaaggctctcaatacctgtggctctcatataggtgttatcttaaccttttttactccagcatttttctccttcttgacacatcgttttggccacaatgtgccccaatatatccacattttcttggccaatctctatgtgggttgtcccacctgcccttaatcctgtgatctatggggtaaggaccaagcaaattcgggagcaagtaatgaggattttgttccgtaaagatcac

SEQ ID NO: 1209 - DNA, 999 bp, Mus musculus
  MOR268-5
atgactccactcttatattttgcgcctctaagagcagctcggggctccactgcagcaacaagagggcagaatgacagctctgtggccgaattcatcctcctgggcttttctgccttccctgaactccaagggcagatgtttggggctttcctggtaatttatctggtgaccctgatgggaaatgccaccattgttgctgtcatcctcctggaccagagcttgcacatccccatgtatctgtttctgcaaaatttatctgtggtagaaatgagtttcagtgcagccattacacctgaaatgctggtagtccttaccagcgagaaagcaaccatttcctttgggggctgttttgcacaaatgtatttcattcttctctttggtggaactgagtgttttctcctgggggcaatggcttatgaccgatttgctgcaatctgccatcctctgtcttaccctatgattatgaacaaaagggtctttgtgaaattagttatattctcatgggtatctgggatcatggtggctactgtgcagaccacatgggtgtttagcttcccctactgtgaccacaaggagattaaccatctcttctgtgagactcctcctgtgctggagcttgcctgtgcagacaccttcctgtttgaagtctacgccttcacaggcaccattttgattgtcatggtcccctttctgttgatactcttgtcttatactcgaattctcttctccatcctgaggatgccatccactacagggaggcagaaggccttttctacgtgtgcctctcatctcacctctgtcaccctcttctatggcacagccagtataacgtatctacagcccaaatccaggtactcaccagacaccaagaaactgatgtcactggcatacacacttctcacacctctgctgaatccacttatctacagcctgagaaacaaggagatgaaaagggctgtgttgaaattatggcaaagaaaagtggctttacacagaggt

SEQ ID NO: 1210 - DNA, 927 bp, Mus musculus
  MOR268-6
cacagctctacagttgaattcatcctcttgggattttctaactatcctgaacttcaaggtcagatgtttggggctttcctagttatttatctggtgactgtgttgggaaatgccatcattatcaccatcatcttcctggaccagagtttgcacatccccatgtatttgtttctgcagaatttatctttagtggacttctgtttcagcacagtcatcacacctgaaatactggtgatcctgactagtgagaaagcgaccatttcctttggtggctgttttgtgcagatgtacttcattcttctctttggtgcgactgagtgttttctcctgggggcaatggcttatgatcgatttgctgcaatctgccaccctctgacctacccagtgattatgagcaaaaggacctttgtgaaattggtgatgtgtccatgggtcttgagtatcatgacagctgttttgtcagtcacatgggtggctagctttccctactgtgaccacaaggagattaaccatctcttctgtgagattcctcctgtgctggagcttgcctgtgcagacaccttcctgtttgaagtctatgccttcacaagcaccattttgatcgtcatggtccccttcttgttgatacttttgtcttatactcgaattctcttctccatcctgaagatgccatccactacagggaggcagaaggccttttctacgtgtgcctctcatctcacctctgtcatcctcttctatggcacagccagtataacttatctacagcccaaatccgggtactcaccagacaccaagaaactgatgtcactggcatacacacttctcacccctctgctgaatccacttatctacagcctgagaaacaaggagatgaaaagggctgtggtaaaattatggcaaagaaaagtgactttacacacaggt

SEQ ID NO: 1211 - DNA, 966 bp, Mus musculus
  MOR105-10
atggggttctccaattggaccactgctcaggagttcattttttctgctttcccttgctcctggggagattctgtcatctgcttcatcccactgctcttcatctatgctttcattatcgttgggaacctggttatcatcacagtggtccagctcaacgcacacctccacacacccatgtacttcttcatcagtgccctttccttcctggagatatggtacaccactgccaccatcccaaagatgctctctagcctgcttagtgaacgaaggagtattacgttgaatggttgtgtcctgcagatgtatttcttccattccacaggcatcagtgaggtttgtctcttgacagctatggcctttgatcgatacctggctatctgcagccctcttcattatcctaccatcatgacttccagactgtgtgcccagctgaccctcggttgctgtgtctgtggctttctcacacccctccctgagattgcctggatctctacacttcctttttgtggctctaatcaccttgagcatatcttctgtgacttcctcccggtgctgcgcctggcctgcacagatacccacaccatcgtcatgattcaggtggtagatattgtccatgctgtggagataattacggcagtgatgctcattttcatgtcctatgttggtattgtggctgtgattctgcgcatccgttcagctgaaggccgccgtaaagcattttccacatgtgtctcgcaccttactgtctttttgctcttctttggtagtgtggctctcatgtatcttcgcttctctgctacctactccttgttctgggacactgccattgctctggcctttgcagttctatcccccttcttcaatcccatcatctatagccttaggaacaaagaaataaaagaagccataaaaaagcacataggtcaagctggcatcttaattggcaagagcagaaacctcccttaa

SEQ ID NO: 1212 - DNA, 945 bp, Mus musculus
  MOR258-6
atgcacagtcgaggctggagaaatcacagctctgtaactgagttcatcctcttgggcttctccagaaaccccaggaccaattggatccttttttttctcttcctcttcctctacttatttacaatcctgggtaatggactcattgttaccctgattagaatagatgctcgtctccacacacccatgtatttctttctcagcatcctctccctcctggatctgagttatgccaccacgaccgtgccccagatgttggctcatctagtaagcaagactaagactatctcttacactgggtgtgtgattcagatgtatattttcttgacactaggcatcactgagacctggatttttgcagctatggcctatgacagatatgttgctatatgttatccactccactatggagtcaagatgagccaaaccctatgcatagccctggtggtcagctctgccctttgtggcctcatctgtgcccttgtctacacagtctttgcaatgaatcttccttactgtggccccaatgagatcaaccacttcttttgtgaaatccctgctgtcttgaagttggcctgtgcagacacatccctcaatgaccaagtagacttcatcctgggcttcatcttgcttctgatcccattatccctcattttggcctcatatgttcggatcttcatagccattctaaggatccgctctactcaaggacggatgaaggccttctccacctgtgcttcacacatcactgtggtcaccatgttctgtgttccatgcatggtcatgtacatgagacctggctctgaagcctccccagaagatgataagaagctggccttgttctataatgtcatttctgccttccttaaccccattatttacagtctccggaacaaagatgtgaagaaggctttcttcaagttaattggaaggggtgaggacacccag

SEQ ID NO: 1213 - DNA, 945 bp, Mus musculus
  MOR202-34
atgtcatacttggagaatagcactaaggtgactacatttatccttttgggattgactgatatcccagagctgcaagtccctctgttcgtcacgttcagtctcatctatcttatcacactgattgggaatctgggcattatcgtgttgatatggctggacttccgcctccacacccccatgtatattttcctcagtcacctctctctggcagactgtgtttactcctccgctgtgactccaaaggtgatggttgggtttctcacaggggataaagttatctcctatggaggatgtgttgctcaaatgttcttctttgtggcttttgccagtgttgactgtttcctacttgctgtcatggcttttgacaggcatgctgcagtgtgcaagcccttacattacaccacaactatgactaccagtgtgtgtgctcgcatggtgattgcctgttattcctggggtttgtttgagtctgctatacatactggattcaccttctccctcccctactgtgctaatgtggttcatcactttttctgtgatatacctccaatcctggctctttcttgctctgatatctatgtgaatgagattgtgctctttatcttagcttcattcaatgtcttctttgctctaatagttatcttgacctcctatgcattcatatttattgctattctgagaatgcattcagcagaaggacggaagaaggccttctctacttgtgcatcccacctcactgctgtcactatattctatggaactgtaatcttcatgtacctacagcccagttctagtcattccatggacaatgaccaaatggcatctgttttctatactacaatagttcccatgttgaacccagttgtctatagcttaagaaacaaagaggttcataatgccttcaagaaagttgttgagaaaatgaacactttgttgaactcctaa

SEQ ID NO: 1214 - DNA, 936 bp, Mus musculus
  MOR202-35
atgacactggtgaagaactggacatatgtaacagagttcattttgctgggactcactgatgatccaggcctgcagcttcccctctttgtcatctttctcctcatctacatcatcaccctggtagggaacctggggatgatcctgctgattttcttggactctcagctccacatccccatgtactttttccttggtaacttgtccctggtggacgtttgttactcttcagctgtcactcctaaagtcatagctgggctgctaataggagacaagttcatatcctacaatgactgtgctgctcagatgttcttttttgcagcctttgctactgtggaaaattacctgttggcctcaatggcctatgatcgctatgtagcagtgtgtaaacccctacattataccacaaccatgacttcaaatgtatgtatctgtctgatcatggggtgctatggttttagtttcctcaatgtctcagtttatctaggagatacatttagtctttctttctgtaattctaatgtggtccatcattttttctgtgatatgccagcaatcatggctctctcctgctctgataaacatgttaatgaactagtacttatttacctagcaagcttcaatatcttcgttgctttcataatgataatagtatcttaccttataatttttatcacaatcttaaacatgcgctcaagagcaggagttcagaaggctctttccacctgtgtctcccacttaactgctgtctttattttctatggaactataatcttcatgtatttgcagccaagctctagacatgcaatggacactgacaaaattgtgtctgtgttctacaccatggtcattccaatgctgaaccctttagtttacagcctgaggaacaaagaggtcaagagtgcattcatgaaaatagttctgaaagaaaaatcatta

SEQ ID NO: 1215 - DNA, 942 bp, Mus musculus
  MOR202-36
atggagaatatttcagaggttactgaatttattctcatggggataacagatgccccagagcttcagattcctttgtttattatcttcactctcatttatttgatcgcactgtttggaaatcttgggatgatcatgttgattctgctagattcccgactccactctcccatgtactttttcctctgtaacctctccctggtggactgtgtttatgcctcagctgtcactcccaaggtgatggaagggtttctcacaggaaataagataatatcctacaatgcatgtgctgcccagatgttcttctttgtagcctttggtgctattgaaagtttgatccttgcctcaatggcctatgaccgtcatgcagcagtgtgcaaacccctgcactatactaccattatgacaagtaccacctgtattctaattgtcacttgctgctacatgtgtgggatcttacaatcctctattcatgttgctcttgcattttgtctttccttctgtaattccaacgtgattaatcactttttctgtgacattcccccactgctggacatctcttgttctgatacctacacaaatgagattacagtccttatcttgggtacttgtgatggtattttaactctcttggttatcttaaacacttacttgcttattttcattgctatcctgagaatgcgttcagctgaagcacagaggaaggcattctctacctgtgcatctcatctcatcactgtattcatcttctttgggtcaaccttgttcatgtatttacagcccagttctaatcattccatggacacagacaaaattgcatctgtgttttacaccatggtgattcctatgctgaaccctgtagtatacagtttaaggaacaaggaggtaaaaaatgcatttaagaaggttgttggaaaattaatgacttcacttcagttagtcaat

SEQ ID NO: 1216 - DNA, 966 bp, Mus musculus
  MOR210-5
atgggtgacaaggagagagacaaccactcagaagtaactgacttcattcaccactcagaagtgactgacttcattcttgtaggcatcagagtccgtccagagctccacagtgtcctttttcttctatttcttattatttatgggatggttcttctgggaaaccttagcatgattggcatcatagtgactgatcccaggctgaacacaccaatgtatttcttcctaggcaacctctccgtgattgacctctcctactccacggttattgtacctaaagccatggtaaacatcttatctcagaaaaagaccatatcctttgtgggttgtgcagctcaacttttcctttatgcacttttcatggtaacagaagcctttatactagcagccatggcctatgaccgcttcattgccatctgcaatcctctcctttacagcgttcgaatgtcaaggagtgtctgtgtccagttggtggctggttcctatctctgcggctgggtcagttccatcctccaaatcagtgtaacattctccatgtctttttgtgcctctagggtcattgatcacttctactgtgattctaatccaatcgaaaagatctcctgttctaatacttttatcaataagatggtgtcacttagtctggctgtgcttattattttgccaacaataatagttattgtagtatcttacatgtatattgtatccacagttttaaagatacattccagtgaagggagaaaaaaagccttttctacctgcagctcccacttgggggttgtaagtttgctttatgggactgtttcctttgtgtatctcacacctccaaataatcctgaacttcgtaaaattgcttcagtatgttatattttgttcacacctatgttgaatcccctaatctattctttacgaaataaggatgtaaaagatgccatgaaaaaagtcttgtgcaagcaaaaggttttactc

SEQ ID NO: 1217 - DNA, 984 bp, Mus musculus
  MOR106-11
atgatcactcatttctcagttgtttctgtttttctaacagctttcggatccaagaacagctccatacattttgtgactgagtttatcctcctgggtttcagtaaccagggggagatgcaaagtttcttcttctgttcaattctgattctttacctcctgaccttgctggggaatggaactattgtttgtgctgtgagatgggatcagaggctccacacacccatgtacatcttcctgggaaactttgcctttttagagatatggtatgtctcttccaccatcccaaacatgttggtcaatattctctctgagaataagaccatctccttctctgcctgcttccttcaattctatttctttttttcacttggtacaacagagtgtttcttcttgtcagctatggcttatgatcgatacctggctatctgtcgaccattacactacccctctatcatgactaggaagttctgtgtcatcctgatttgtatctgctgggtgagtggattcctctgctatccagtcccaattgtcctcatctcccaacttcctttctgtggtcctaacatcattgaccactttgtgtgtgacccaggaccattgtttgcactatcctgtgtgcctgctccttccactgaacttctctgttataccttcaactcaatgattatctttgggcccttcttctgcatcctgggatcctatactctagtactcagagctgtgtttcgagttccttctggtgctggtcgaactaaagctttctctacatgtggatctcatttagtggttgtgtctctgttctatggaactcttatggtgatgtatgtgagcccaacatcagggaatcctgcaggaatgcagaagattgttactctgatttactcagccttgacccccctcttaaatcctctcatctatactctccgaaacaaagaaatgaaaaatgccttaaagaaactgctaaagctaacaattatccaaaac

SEQ ID NO: 1218 - DNA, 942 bp, Mus musculus
  MOR106-12
atgaacgtgtcagagggatccacggtgacatattttgtcttattgggattccctggtccctggaagattcaaatcacacttttctcactgattctgctgctctacatgataactttgactgggaatatggccatcatttgtgcagtgagatggaaccaacaactccacacccctatgtatatgttcctggccaacttctccttcctagaaatctggtacgtgacctgcacagttcccaacatgctgatcaactctctttccaaaactaagactatatctttcactggatgctttactcagttctacttcttcttctccctgggcacaactgaatgcttcttcctctgtgccatggcttatgatcggtacctagccatctgctacccactgcactatccttccatcatgactaggcaattctgcagtattctgatgtccctctgttggatcattggtttctctgcacatttgattcccattttccttatttctcaattgtctttctgtggccccaatatcattgatcactttctctgtgatgtggacccactaatagcactgtcctgtacccctacacacatcataagtcatgtattctattctataagtactcttatcattattctcactggtttgtacatccttggatcttatgccttggtgctcagagctgttcttcaggttccttcttcagatggacgtcaaaaggccttctcaacctgtggatcccacctgctggtagtgtctctgttctatggaaccataatggtgatgtatgtcagccccacatctggcaactcagttgacatgaataaaattatcacactgatatattctgtggtgacaccagctttaaatcctttcatctatagtctgcgtaacaaggatatgaaatatgctctccatcatgtcttctttgggaatagcattatgcaaaactta

SEQ ID NO: 1219 - DNA, 945 bp, Mus musculus
  MOR243-1
aaaaacaaaaacagctctgatgtgtcacgatttgtgcttctgggcctgtcgtcttcctgggagctccagttgtttctcttcttcacatttttgttgatttacctggttattgtcctgggaaaccttttgatagtgatggtcgtccaagctgatgctcacctgttccagtcacccatgtactattttctaagccatctgtctttcattgacctttgcctgagctgtgtggctgtacccaaaatgctaggagatttcctacagaaggagaagacaatatctttttcaggatgcctggcccaggtattctttcttcactttcttggagccagtgagatgttcctgttgactgttatggcctatgataggtatgttgccatatgcaaccctttgcactacctgacggtcatgaataaccacctgcgacttcggttggtgtttggctgctggtgtggaggtttcattcactctatcacacaggtcatgattgtcattcagctgcctttttgtggtcccaatgaactggacaacttctactgtgatgtcccccaggttgtcaagctggcctgcatggacacttacttggttgaggtgctgatggtctctaacagtggcatactgtctcttgtctgcttcttggtcctgctcttctcctatgctctcatcttgattactctgagaactcacctccaccggggccagagcaaggcactgtccacctgtgcttctcacttgacggtggtcagcctgatctttgtaccctgtgtattcatttacttgaggcctttctgtaccttctctgtggataaagtagtctctgtgttttacacagtgatcacacctatgctgaaccccctcatctatacactcagaaatgcagacatgaagcaagccatagaaaagctgagaaagaagcaagtggcatcccactgctttgctaaaggatga

SEQ ID NO: 1220 - DNA, 978 bp, Mus musculus
  MOR264-20
atgcaatccaaatatgtgaacctacaaagagcaaacaaatttaaaatcacagacacaaatcttagtgtacctatagaatttgttctcttgggattttctgatattccccaattgcactggtttctctttggaatcttcttcttcatctacatgattatccttctgggaaatggcctcatcattttaatcacaagagttgaacccactctgcaaacccccatgtactttttcatcagcaacctttctttcctagaaatttgttatgtttctgtcactcttcctagaatgcttatggatctcttcacactgaaaggaaatatttcctttcttgcctgtgctacacaaatgtgtttattccttatcctgggtggcactgaatgcttcctcctggctgtgatgtcctatgaccgctatgtagccatctgcaaccctctgcactatcctatagtcatgagttccaaggtgtgtacccagttagtggttggttcctgggtcattggtgttcccattcaggtggggcagacatatcagattttgtctctgcccttctgtgaatctaaccaaattaaccatttcttctgtgacatgcctccactactcagattggcatgtgggaacatctttgtgaatgaacttgtggtctttatttttgttgtattgattgtcactatcccattcatgttaatacttgcatcttacagcaggatcatctcaactatcttgaagttgccatcaaagacaggaaggacaaaagccttttctacctgctcttcccaccttatagttgtgtttttattctatggatcagctagtatcacctatttaaaacctaagtccaataagtttgaggggacagacaaacttctctctctgttttacaccattttgactccaatgttcaatcccttgatatatagcctgaggaacaaggatgtcacaggggcactgaaaaaattatttaccagattgttagcattg

SEQ ID NO: 1221 - DNA, 930 bp, Mus musculus
  MOR261-11
atgggagccaaccaaacatgggtcacagacttcatcctcgtgggactccagctcagcgcaggtatagaaatgttccttttctggatcttctccctgctgtacatcttcagcctgctcgcaaatggaataatcttagtagtcatctgcctggaccccaagctgcacacccctatgtacttctttctttctcatctggccattcttgacatatcctatgcttccaacaatgtccccaagatgttgtccaaccttataaaccagaaaagaaccatctcatttgccccatgcatcacacagacattcttgtatttggcctttgccgcttcggagtgcttgattttggcagccatgtcctatgacaggtttgtggccatctgccaccccctacactacactgtcatcatgagttggaaagtatgtgtggccctggctgtcacatcttggtcatgtggatttagcctctctgtggcacacacaattctcctgctaaggttgcccttttgtgggccccaggaaataaaccacctcttctgtgaaatcctggctgttctcaagctggcctgcgccgacactttgatcaaccaaatcgtcatcctagctgcatgtgttttcgtcttagttggacccctttgctcaatgcttgtatcttacacgcacatcctctggacaatcctgaaaatgcagtcaaaggagggtcgcaggaaggccttttccacctgttcctcccatctctgtgtggtggggctcttctttggtatagccatgttggtttatatggtccctgactctgatcagcgagaggagcaggagaaaattttgtcactgttccacagtctctttaacccaatgttgaatcccctcatctatagtctgaggaacacccaggtgaaggaagccttccacagagcactgcagaagaagagatctgtg

SEQ ID NO: 1222 - DNA, 924 bp, Mus musculus
  MOR261-12
atgaaccagacatggatcactgaggtcattctactgggattccaggttgacccctctctggagatgctcctgtttgggctgtttttgctgttctactgcctcacgttgatgggaaatgggattatcctggggctcatctgcctggatgctaggctgcacactcccatgtacttcttcctctcacatctggccatagttgacatgtcctacgcctccagcactgcccctaagatgctgacaaatatggtgatgcaccaaaaaagcatctcctttgcttcatgcatacttcagacatttttgtatctggcttttgcagtgacagagtgtttgattctggtagtgatgtcatatgatcgctttgtagctatctgtcatcctttgaaatacacactgatcatgagctggagagtatgctccatcctggctgctacttgctgggtgtttagcttcctcttggcctcactccatatcacgctcattctaagactcccattctgtgggccacaaaaagtcaaccattttttctgtcaaatcatgtcagtattcagattagcctgtgcagacacaagactcaatcaagtcgttctttttgcaggctctgtgatggtcttactggggcccctgtgcttggtgttagtctcctatacacgaatcctggtggccattctcggaatccactcaggggagggtcgcagaaaggccttctccacctgttcttcccacctctgtgtggttgggctcttttttggctgtgctatcgccatgtacatggcccccaaatccaagcattcccaagaacagagaaagatcctgtctttgttttacagccttttcaaccctatgctcaaccctctgatctacagtttgaggaacacagaggtaaaaggtgccttgagacgagttctttggaaacagagatcactg

SEQ ID NO: 1223 - DNA, 948 bp, Mus musculus
  MOR174-16
atggcttatgaagtggtgaatcagagttctgctaccacattcatcttggtcggtttctcagaatatccacagctccaaatacccctcttcctcctgttcttgaccatctactcagtaacactgatggggaacctgggcatacttgtggttataaaggttaatcccaaacttcacactccaatgtacttttttcttagccacctatcatttttggatatatgttattctagtgtatttacacccaaacttttgcagatcttgattatggaagataggacgatttcttttattggatgcatgatacaatttttctttatttgtacattcgtgattacagaaatgttcatgttagcagtgatggcctatgacaggtttgtggctgtttgtaatcccttactctacacagttgtaatgcctatacaattctgtgctctgctagtagctgggacatatatgatcggtggactatgtactttgataattctatatactcttttgcaactctgttattttgaatatggcatcatcaatcactttggctgtgaatactctgctgtcatctctgtgtcttgctctgactcctcctttagccagttgatatgcttagtcatatctattgctagtgaattttctagtgtcctgatcactttagcctcatatgtgttcatagttgtcactattataaagatgccttccaaaggaggactacagaaagccttctccacctgtacttcccacctgactgccataacaattttccatgggatcttactactcctgtactgtattcccaactcaaacagctcacggctctttgtcaaagtggccactgctctttatacaatcatgatccccatgttgaacccccttatctatagccttagaaataaagatgtgaaggacacagtcaggagacttatcagctcaaaactgcactctcacttgaca

SEQ ID NO: 1224 - DNA, 942 bp, Mus musculus
  MOR177-14
atgcaaagaagaatggaaggggaaaattgttcttcctttactgaattcatactaatgggaattaccaacaactctgaggtaaaagtggttctgttcacaatatttctactggtctatctaatcaatctcattgggaatcttggaatgattcttttaattaaagtggatcctcagctacaaaccccaatgtactttttcctcagtaacctgtccttctgtgatctctgctattccacagcagttgggcccaagatgttaatggacatatttggtaatgataaatcaattcaattttttggctgtgctctccaattcttcatttcctgtacatttgtggattctgaatgtatattgctggcagtgatggcctttgaccggtaccaggccatcagcaaccccttgctttatacaacaaacatgtctaacaggctgtgctccttgttagtggctggagtttattttgtaggtgtggcagactctttgatccatacaacattgacatttcatttgtgtttctgtggatctaatgaaattgatcacttcttttgtgatatccctcccatcttactactgtcctgctcagatacacaggtcaatgagttagcaatattcacaatttttgggttcattgaattgagcaccatctcaggtgtccttgtctcctattgttacatcatctcatcagttttgaagatcagctctgctgggggcaggttcaaagctttctctacctgtgcctcccacctgactgcagttgcgattttccaaggaactgtgcttttcatgtatttccggccaagttcttcttattctctggatcaagacaaaatgagctccctgttttatattcttgtgatacccatgctaaaccctttgatttatagcctgagaaacaaagatgtgaaagaagctctgaaaaatctgaaaaataaaaggtgctgt

SEQ ID NO: 1225 - DNA, 999 bp, Mus musculus
  MOR128-2
atgttgccatttaacgatgaagatgaattttccctttttagatacagcagaaccatgcaccaaggaaaccaaactgctatctctggattcatcctcctgggactcacagtgggatctgagcagcagctgctcctcttcacactgtttctctgcatgtatctggtcactatggtaggaaactcacttattattctggcaatcatcagtgatactcacctttacagtcccatgtacttcttccttgccaacctatccttcacagacatctgcttcacaaccactacagtccctaaaatattggcagacattcaaagccagaatccaaccatctcctttgtaggatgctttacacaaatgtattttttcatgttcctggtggacttggacaatttccttttggcagccatggcatatgaccgatatattgccatctgtcacccattacactatgctgcactgttaaatcccaagcgctgtgccctgttggttgtggttccatgggttatctctaatctagtctcagtactgcatctcagcctgctgagtcgcttgcctttctgtgatcagagagtaatcccacacttcttctgtgatctggaacccgtgttaaggcttgcttgttcagacactcaaatcaacaatttgctcatcctcattgttgggggaacagttatcttcgtcccctttgtttttattcttgtctcctatgcacttattggcactgctgtgcttaatgttccatcagtaaaaggaaagtggaagacattttctacatgtgggtcccacctctcagcagtgtctctcttctatgggtctattgttggtgtctactttctcccagcttccagctactcagcagaaagggataaggtagctgccatcatgtatacagttgtaacccccatgatgaacccctttatctatagtctaaggaacaaagacatgaaaagggcactgagaaggctgctcagccaaaaaagcttgatttgtagttggtga

SEQ ID NO: 1226 - DNA, 945 bp, Mus musculus
  MOR202-37
atgatgcagaatatttcagaactgtcagaatttattcttcttgggttaacagatgcaccattcctgcaaactcctttatttatcatctttactctcatttacttgacaacattgtttgggaatcttggaatgattttgctgattctgctggactccagactccacactcccatgtactttttcctcagtaacctctctctggtggactgtgtttatgcctcagctgtcacccccaaagtgatagaagggtttctcacagaaaataagatcatatcctacaatgcatgtgctgcccagatgtttttctttgtagcctttgctattactgagtgttttattctggcctcaatggcctatgaccgtcatgcagcagtgtgcaaacccttgcattactccactactatgacaactacgatatgtgtcctgcttcttgctggatcttacttgagtggactcttacaatcttccatccatgtttccttcacattccatctttccttctgtcgttctaatgtagtcaatcactttttctgtgatatccccccactattagctctttcttgctccagtattcacataaatgaaattatactcttcatgttggcaggattcaatgttgttttttccctattggttatattgacctcttacttactaatttctgttgcaattgtgagaatgcgctctgctgagagcaggaagaaggccatttccacctgtgcatcccaccttaccactgtttccatcttctatggcacaattatcttcatgtacttacagcctagctccaatcactccatggacactgacaagatggcatctgttttctacaccatggtcattcccatgctgaaccctcttgtatatagcctgagaaataaagaagtcaagaatgcagtcaggaaggttgctggaaaagcattgttttcactgggattagtcaat

SEQ ID NO: 1227 - DNA, 960 bp, Mus musculus
  MOR218-8
atgaatgtgagcttcaagactggattcctcctcatggggttctctgatgagcgtaaccttcagattttacatgcagtgctctttttgatcacatacctgttggccatcatgggcaatctgctcattatcaccatcatcaccttggaccaacgtctgcattctcccatgtactacttcttgaagcacctctcttttttggatctctgcttcatctctgttactgttcctcagtctattgcaaactcactcatgaacaatggtttcatttctcttggtcagtgtatgcttcaggttttcttcttcatagctctggcctcatcagaagtagctattctcacagtgatgtcttatgaccggtatgttgccatctgtcggccactgcagtatgagacaattatggatccccatgcctgcaagtgcgcagtgatagctgtatggatggctggaggactatctgggctcctacacacaggtgttaatttctcaattcctctttgtgggaagagaattattcaccagttcttctgtgacattccccaaatgctaaaactagcttgttcttatgaattcattaatgagattgcagtggctgcatttacaacatccacagcctttgtctgtttaatagccatagtcttctcctatactcagatcttctcaactgtgatgagaattccatcagctgatagtcggactaaggtgttctccacctgtctaccacatttgtttgtagtcatgttcttcctctcagctgcaggctttgaatttctaagacctccttcagattccctgtcagcaatggacctcatattctccatattctacactgtgatacctccaacactcaatccactcatctacagcttgaggaatgaggccatgaaagcagctctgaggaaagtgttgtcaaaagaagaattttctcggagaatggtatatgttaaagctatattcaatctc

SEQ ID NO: 1228 - DNA, 936 bp, Mus musculus
  MOR218-9
atgatagtggaaaacataaccacaatgagaggattcctcctcatgggattctctgacaaccatgagctgcagatcttacaggctttgctcttcttggtgacatacctattgggctcagcagggaacgtcatcattatcaccatcacaacactagacccacagctccagtctccaatgtattactttctgaagcacctttccattctggacctctcatccctctctgtcacagttccccagtatgttgacatttgcctgacacagagtggctacatttcatatgcacagtgcatgctgcagatatttttcttcacaggttttgcttggggtgaggtggccattctcacagtgatgtcatatgatcggtatgtagctgtttgtcttccacttcactatgaagtcatcatgggtcccagcaagtgtaggtgggctgtgacagctgtatggctaagcagtgtcattccaggaaccctgtatatagcatccatattctctatcagattctgtggggacagaataatccaccaattcttctgtgatgtcccccaggtgctcaagttctcctgctctgatgattaccttgtaacagttggagtggctgatttcctgtctgcagtggcctttgcctgcttcattgggattgtcaactcctatgtccacatattctccacagttctcaggatgccctctgctgaaagcaggtctaaggtcttctctacttgcctgccccatctttttgttgtcttattgttcctttctacaggcatctttgcatatctaaacccaacctcagactctccaactgctttacagtttttggtctctatcttttacacagtattacctccaactctcaaccctgttatttatagtctgagaaatgagacgataaaaagtgttataaggaagttactattgagttcaaaattcactggt

SEQ ID NO: 1229 - DNA, 990 bp, Mus musculus
  MOR263-10
atgatttgctgtcctttctttcaggagatgagtatcaactgctctctgtggcaggagaacagcttgtctgtcaaacgctttgcatttgccaagttctctgaggtccctggagaatgcttcctcctgttcaccctcatcctcctcatgttcttagtatcactgacaggaaattcactcatagcccttgccatctgcaccagtgcagccctacataccccaatgtacttctttctggccaatttgtctctcctggagatcggctacacttgctctgtcatacccaagatgttacagagccttgtaagtgaggcccgagggatctcacgggaagggtgtgccacacagatgtttttctttatattctttggtataactgagtgctgtctattggcagccatggcttttgaccgctacatggccatatgctccccactccactatgcaacacgaatgagtcgtggggtatgtgcccatttggccatagtttcatggggaatgggatgtatagtagggttgggacagaccaattttattttctcgttgaacttctgtggaccctgtgagatagaccacttcttctgtgaccttccacctgtcctggcacttgcctgtggagatacatcccaaaatgaggctgcaatttttgtggcggcagtcctctgcatatttagtccatttttgctgattatttcttcctatgtcagaattctgattgcagtgctggtaatgccctcacgtgaggggcgccataaagctctctccacctgttcttcccatctacttgtagtcacactcttctatggctcaacgtctgccacctatttgaggcccaaatctgatcactcaccagaagtggataaactcttggcccttttctacacagcggtgacatccatgctgaaccccatcatctatagcttaaggaacaaggaagtgaaggcagcactgagaaaaacactgagtctgaagaaagttctgataatgaatagg

SEQ ID NO: 1230 - DNA, 936 bp, Mus musculus
  MOR218-10
atgataatggaaaatataaccacaatgagtggattcctcctcatgggattctctgacaaccatgagctgcagatcttacaggctgtgctcttcttggtgacatacctagtcggctcagcagggaatgtcatcattatcaccatcacaacactggacccacagctccagtctccaatgtattactttctgaagcaactttccattctggacctctcatccctctctgtcacagtccctcagtatgttgacagttccctggcacgaagtggctacatttcatatgggcagtgcatgctgcagatatttttctttacatggtttgcctggggtgagatggccattctcacagtgatgtcatatgatcgttatatagctgtttgccttcctctccactatgagatcatcatgtgtcccagaaagtgtaggtgggctgtgacagctgtatggctaagcagcagtattccaggaaccctatatctagcaaccatattttctattagaatctgtagggccaaaataattcaccaattcttctgtgatgtcccccagctgctcaagctctcctgctctaatgattaccttgtaataatgggagtggctgacttcctgtcagtaataggttttgcctgcttcgttgggattgtcatctcctatgtccacatattctccacagttctcaggatgccctctgctgaaagcaggtctaaggtcttctctacttgcttgccgcacctgtttgttgtctcattgtttctttctacaggcatctttgcatatctaaacccaacctcagactttccaactgctttagagttcttattttctgtcttttatacagtactacctccaactctcaaccctgttatttacagtttgagaaatgatgccataaagagtgttgtaaggaagttactgttgagtagaaaattcactagt

SEQ ID NO: 1231 - DNA, 942 bp, Mus musculus
  MOR218-11P
atgataatggaaaatataaccacgatgagtggattcctcctcatgggattctctgacaaccgtgagctgcagatcttacaggctttgctcttcttggtgacatacctagtcggctcagcagggaactgcatcattatcaccatcacaacactagacccacagctcaagtctccaatgtattactttctgaagcacctttctattctggacctctcatcactctctgtcacagttccccagtatgttgacagttccctggcacgaagtggctacatttcttatgaacagtgcatgctgcagattcttttctttacatgttttgcctgggatgagatggccattctcacagtgatgtcatatgatcgttatgtagctgtttgccttcctctccactatgaggtcatcatgagtcccagaaagtgcacttgggctttggcagctgtgtggctaagtggaggtgtctcaggaacactatacacagcaagtacactctctatcagattctgtggggacagaataatccaccaattcttttgtgatgtcccccaggtgctcaagctctcctgctctaatgattaccttgtaacaattggagttgctaatatcctgtctgcagtggcctttgcttgcttcattgggattgtcatctcctatgtccacatattctccacagttctcaggatgccctctgctgaaagcaggtataaggtcttctctacttgcctgccccatctttttgttgtctcattgtttctttctacaagcacctttgcatatctaaacccaaccgcagactctccaactgctttagagttcttattttctatcctttacacagtactacctccaactatcaatcctgttatttacagtttgagaaatgagacaataaagagggttgtaaggaagttactgtcgagtacaaaattcactgtttagaat

SEQ ID NO: 1232 - DNA, 991 bp, Mus musculus
  MOR263-11
atgatttgctgtcctttctttcaggagatgagtgtcaactgctctctgtggcaggagaacaagttgtctgtcaaacactttgcatttgccaagttctctgaggttcctgaagaatgcttcctcctgtttaccctcattctcctcatgttcttagtatcactgacaggcaatgcacttataactcttgccatatgcaccagtccagccctacacacccccatgtacttctttctggccaacttgtctctcctggagatcggctacacttgttctgtcataccgaagatgttgcagaaccttgtaagtgagatccgaggtatctctcgggaagggtgtgccacacagatgtttttctttatattctttggtataactgagtgctgtctattggcagccatggcctttgaccgctacatggccatatgctccccactccactatgcaacccgaatgagtcgtgaggtatgtgcccatttggcattagtttcatggggaatgggatgtatagtagggttgggacagaccaattttattttctccttgaacttctgtggaccatgtgagatagaccacttcttctgtgaccttccacctgtcctggcacttgcctgtggagatacatcccaaaatgaggctgcaatctttgtgacagtagttctctgcatatctagcccatttttgttgatcatttattcctatgtcagaattttgtttgcagtgctggtgatgccttcacctgaggggcgccataaagctctctccacctgttcctcccatctacttgtagtcacattgttctatggctcagcatctattacctacttgaggcccaagtctagccactcaccaggaatagataaactcttggcccttttctacaccgcggtgacattccatgctgaaccccatcatctatagcttaaggaacaaggaagtgaaggcagcactgagaagaactctgagtctgaagaaacctctggcaataaatagg

SEQ ID NO: 1233 - DNA, 948 bp, Mus musculus
  MOR221-3
atggccaactccaccctagttaccaattccaccttggttaccgagttcatgctggaagattttgctgagacttgggaactcaggatcctactcagcgtgctgttcctgctggtgtacatgggaagcctgttagggaaccttaccatcatcattgctactacagttgaccagacactgaacacacccatgtacttcttcctcaggaatctgtccatcttagacatgtgctacatttctgtcactgtgcccaatgcttgtatcaactctctcactgaccacaggaacatttctgtggctggatgtgtagcacaggtctttttggtcttattttgtgcggctgtagagattcagtttcttaccatcatggcccaggaccgctatgtggccatatgcaagcctctcctctaccctatgattatgaaccatcaatactgcattcagatgacactggcttccctacttacctctcttatccttgcaagtgtccatacttccaaaactttccagctgtccttttgtcactctaaagtaattccgcatttcttctgtgacatcccctctttgctgaggctttcttgctctgacacctttaacaacaaactcttacttcttctgactgccattggtctcagtggtagctgctttaccttcattgctatatcatatgctcgcatattatcagctgtgttgaaggttcctgtcaaaggagagagaggaaaagccttttccacttgtgtccctcacattattgtggtttctgtgtttcttagttctgctgcctatgtgtatctaagacctccagtagtaacattggaagtagttcaggagatgacactttctgtgttctataccattgttccaccattcttaaatcctatcatctatagtcttagaaacagacagataaaggaggctgtgaagaaagtagtattaagaattactttcata

SEQ ID NO: 1234 - DNA, 969 bp, Mus musculus
  MOR219-4
atggaagactctagcatgtccaatgacactagaataacagggttcatccttatgggattctcggctgctcctgaactacagactgtatgtgggctgttctttctggtaatgtacgttgcagtcataatgagtaacctcctcctcatcacactcatcaccctggatctgaaactccaaacacctatgtactttttcttgaagaatttgtccctgttggatatcttctttatttctgtaccaatcccaaatttctttatcaatagcataactcacaataactcaatttctattctgggttgtgccctccaagtgtttttaatgacttcttttgcatctggggatgtatttgttctaacagcaatgtcatatgaccactatgttgccatctgctgtcccctacactatgagaccatcatgagtagtggtaactgtgtgctgatggtgggtgtttcctgggctattggagtactctttggagctttatacacagctggcacattttccatgcctttctgtggctccattgtgatcccacagtttttctgtgatgttccctcattgttaaggatctcctgctctgacatacttgtggtcatttatacaagtcttggaatgggtgtttgtctgggcatgtcttgtttcatctgcgttgtgatctcttacttttacattttctccactgtgctgaagattcctaccactaaaggtcagtccaaagcatttgccacctgcctcccccatctcactgttttcagtgttttcattgttacagcttgctttgtctatctgaagccaccctcagttgtaccatcaatttcagacaggctgttttctgtgctacacactgtgttgcctccagcacttaatcctgtgatttacagcctgagaaatagtgatgtcaagcgtgctttgaagaggttgcaacaaaatctctgtccaagtggttcacttcatgtaacaattcaaagt

SEQ ID NO: 1235 - DNA, 957 bp, Mus musculus
  MOR219-5
atgctcaatgccactagaataacagggttcatccttatgggattctcggttgctcctgaactacagactgtatgtgggctgttcttgctggtaatgtacctagcagtcataatgagtaacctacttctcatcacgctcatcaccctggatctgaaactccaaacacccatgtactttttcttgaagaatttgtccctgttggatgtattctttatttctgttccaatcccaaatttctttatcaatagcataactcacaataactcaatttctattctgggttgtgccctccaattgtttttaatgacttcttttggagctggagacgtatttgtcctaacagccatgtcatatgaccgctatgttgccatctgctgtcccctacactatgagaccatcatgagtagtggtaactgtgtgctgatggtgggtgtttcctgggctactggaattctgtttggagctttatacacagctggcacattttccatgcctttctgtggctccatggtgatcccacagtttttctgtgatgttccctcattgttaaggatctcctgctctgacacacttgtggtcatttatataagtcttggaattggtttttgtctgggcatggtttgtatcatatgtgttgtgctctcttacttttacattttctccactgtgctgaagattcctaccactaaaggtcagtccaaagcatttggcacctgtatcccccatctcactgttttcagtgttttcattgctactgcttgctttgtcaatctgaagccaccctcacgttcagcatcaattgcagacagtctgttttctgtgctatatactgtgttgcctccagcacttaatcctgtgatttacagcctgagaaatactgatgtcaagtgtgctttgaggagtttgcaaaaaattctctgcccaagggattcacttcacttaagagttcaaagtatc

SEQ ID NO: 1236 - DNA, 930 bp, Mus musculus
  MOR223-8
atgcaaagcggcaaccaaacctctgtgtctcacttcattctggtgggcctgcaccacccacctcagctcggggtaccactcttcctagcattccttgtcatctacctcctcactgtctctggcaatgggctcatcatcctcactgtcttggtggacatccggctccaccggcccatgtactggttcctatgtcacctctccttcttagacctgaccatctcttctgctattgtcccaaagatgctatctggctttcttttggatagtagaatcatctcctttgggggctgtgtgattcagctgttttctttccatttcctgggctgcactgaatgctttctttacacactcatggcttatgaccgattcttggccatctgcaagcctttacactatgctaccatcatgactcgcagcgtctgtaactaccttgctttgggcacctggattggagggactatccactcacttttccaaacgagtttcatattcaggctgcctttctgcggcccaaaccgagttgactacttcttctgtgacatccctgccgttctccgtctagtctgcgcagacaccaccatcaatgagttggtcacctttgtagacattggcttcctggccctcacctgctttatgctcatcctcacttcctatggctacatcgtggctgccattctgcgaatccggtctgcagatgggcgccgcaatgccttctctacctgtgctgcccacctcacggtggtcatcgtctactatgtgccctgtaccttcatttacctacggcctggctcacaggagccactggatggggtggtagctgtcttctacacagtcattactcccttacttaaccccatcatctatacactacgaaacaaacagatgaaggcagctttgaggaggctgggaggtctcagggaggtgcacccc

SEQ ID NO: 1237 - DNA, 943 bp, Mus musculus
  MOR224-11
atgaggaaccacacctctgtgacagagttcatcctgctgggaatttccaacagtgaaggaaggactagagagcatgctgtttgccctgttcctggtcttctatgtctttgccttgctggggaacctgctcatcttcctcaccatcctggcttctcccaacctccacacccccatgtatttcttcctggggaacctggcagtgtttgacatattctttccttctgtgaattctcctaagatgatggactacctagtacggcaaggccgaaccatctcataccagggttgtgtctcccaagtcttcttctatcacactctgggtggcacagaatgttttctatatacagtgatggcttatgaccgctttgtggctatttgtcaccctatgagatacacagtcattatgaaccacagggtgtgtacctgcctcacactgggcacttgggttggaggctttgtccatgggagcatcctcacatttcttatctttaagttaccctactgtggtccgaataaggtgaacagtttcttctgtgacattcctgtggtgctgtccctggcatgtgcagatacctctctagcaagaactgtgagttttaccaatgttggtgtcgttgcgctcacatgttttcttctcattctcacttcttacactcgtattgtgatctccatcctgaaaatccgatcctcggaaggcaggcgcagagccttctcgacctgcagtgcccacctgacatctatcatcttggtgtatggccccgtgattcttgtgtatctcagacctgcttctagtccctggttggattctgttgttcaggtgtttaacaatgtcatcacaccctctttgaaccctctgatttacaccctgaggaacaaggatgtgaaattagccctgaagaaggtggtatctcaaggggcccagcctttaggttataaggaatag

SEQ ID NO: 1238 - DNA, 943 bp, Mus musculus
  MOR283-12P
atggaagtctgtaactccaccttgagaagtggcttcatcttgatgggtattttggatgacaatgattttccagaactgctctgtgctactatcacagccctgtaccttttagctttgacaagcaatggactactgctgctggtcatcaccatggatgcccggctccacgtgcccatgtatcttctgctctggcaactctctctcatggacctgctcctcacatcagtcatcactccaaaggccatactagattatcttctcaaagacaacactatctcatttgggggatgtgcccttcagatgttcctggctttgacacttggtactgcagaggacctccttctgtcctttatggcctatgacaggtatgtggccatttgtcatcctctgaactacacaattctaatgagtcagaaagtctgctgtctcatgatagccacttcatggagtcttgcatctctcagtgctctaggatatagcatgtataccatgcaatatcctttctgcaagtccaggcagatcaggcatctcttctgtgagattcctcccttgctaaagctggcctgtgcagacacctccacatatgaactcatggtttatctgatgggtgtgaccttgctctttccagctcttgctgccatcctggcctcctactcactaattctattcactgtgctgcacatgccctctaatgagggcaggaggaaagcccttgtcacctgctcttcccatctgactgtggttgggatgtggtttgggaggtgctattgtcatgtatgtattacccagttccttccacagccccaaacaagacaatatcagctcagttttttatacaattttcactccggctttgaatcccctcatctacagcctaaggaataaggaggtcactggagctttgaggagagtccttgggaaaagtttggtcagtacagtctac

SEQ ID NO: 1239 - DNA, 947 bp, Mus musculus
  MOR206-6
atgtacacctggaatcacacaaatatgccagactttatcctcatgggattgacagactccaaagaaatacagctgatcctctctgtactgtttctcctgatatacctagtcactgttctggggaacataggcatgatattgatcatctatatagatactcagcttcacactccaatgtattttttccttacccatctgtcagtagttgacctcagttattcaactgccatcacaccgaaaacgttagagaacatgctaacaacaaacaagagcatttcctacaccaattgtttcgcacaactgtacattttcatcctcttagcagctactgaatgttttttgctttcctcaatggcctatgaccgctacatagctatctgcaaccctttacattacccagttattatgtctccacgatgctgccttgctctccttactgggtcctatgtaattggagctgtggattccactctaactgtgtttagcatgattacactacatttctgcaaatccaatgtcatccgtcatttttattgtgacacatctccacttctatctctgtcttgcagtgacacacatgtagttgaaatcattatattcatttttgcaggttccacaatcctggggtcccttatcacaatatctggatcctatgtatccattctttctactattttgaatataaattctacttcaggaaagcagaaagccttttccacttgtgcctctcatctcctcggagtgactgttttttacagcactctgatttttacttatttaaagccaactaagtcctattctttgggaaaggaagaagtggcgtctgttttctatactattgtgatcccatgctgaacccactaatttatagtctcagaaacaaagaggtcaaaagtgctgttgttagattagtaaagacgagacaaggatccaggaagttaatttaa

SEQ ID NO: 1240 - DNA, 951 bp, Mus musculus
  MOR197-1
atgaaggcatactcagaggctaagcacaatggcactgaggcaactgagttcattcttctgggactaagcacacgaccagagctgcagccaattctttttttggtattcctcacaatttacctcatcacactgactgggaactttggcatgatcttattaatcaggttcactcctcagctgcaaacccccatgtattttttcctgacacacttggcatgtgtggatattttttactcaacaaatgtctctcctcagatgcttgtcaattttctatctgagaagaagactatttcttacattggatgtctgactcagtgctttgtttttgtcactctgctgttaactgaatattacatgctgggtgccatggcctatgacagatacatggcaatatgcaaacccctacattacagcacaaaaatgtcccggccagtttgcatttgcctggttacattcccttacttctggggtagtatggtgggcacaatgcaggtgatattgacttcacgtctatccttttgtggacccaacaccatcaaccacttctactgtgctgaccctcccctcttgatgttaacctgttctgacacttatatcaagcaaactgccctctttgtgtcagctgggattaatcttacaggttcccttctcattatcctcatctcctacatttttatcttcatcaccatcatgaggatccgttccagtgaagggcaacgaaaggctttctctacctgtggctcacacctgacagctgttactatgttctatggttccctcttctgcatgtacctgagaccagcaaatgagaggtctgttgagcaaggcaaaattatagcagtattttgtatttttgtgagtcccatggtgaatccatttatctacagcctgagaaacaaggatgtgaagcaggctctgagaagagtgtttataagaaatctctgcaaagtg

SEQ ID NO: 1241 - DNA, 941 bp, Mus musculus
  MOR175-9
atggaagaaaagaatcagactgtcatgcctgagtttctcttccgtggcattacagataacctccatcagaagattgtcatcttcatcattttttctttgtttatcttgttactcttgggggtaatgtggggatgatcactctcatatggttggaccccaggctgcacacacctatgtacttttttctcagccaactgtcctttgtagatgtgtcttcctcttcttccatagctcccaagatgctgtgtgacatttttgcaaggaacaaagccatctcttttgtgggctgtgcaacacagatgtggttctttggtctctttgtggcaactgaatgctttctcctggctgccatggcatatgatcggtatgcagccatatgtaagcccttgctgtacacacttattatgtctccacatctctgtatgttgttggttgttgggatttatttcattgctcttataagtacaatgatacacacaactttgaccttttgcttaccattctgtggtccatatattatcaaccactttttctgtgatgtttctccattgctgtctctagcatgtactgacacgcagatgattaagttggtgttttttgtcttggctggcacagtaggtatgttcactggtctgataattctggggtcctatgtatgcatcttgaaggcaattttgaagattcagacagccaatgggagacaaaaagccttctcaacttgttcctctcacttggtgactgtcgctatcctgtatgggactcttttcttcatctatgttcgacccaatgccagttcctccttgaatattaataaagtgatctctttattttacactgtggtgatccccatgttgaatcccctcatctacagcttgaggaaccaagaggtaaaaaatgcattcaggagaactttgaagaagaagcacttcctaataggtgtt

SEQ ID NO: 1242 - DNA, 945 bp, Mus musculus
  MOR143-2
atggaaatagagaaccacacacttataacaaaatttctcatcctgggtctctctgatgaccctgaattgcaacctattctctttggattgttcttgtccatgtatctggtcacgctgcttgggaatttgcttattatcttggctgtcagttctgactctcacctccataaacccatgtatttcctcctctccaatctgtcctttattgatatctgttttatttcaacgacaataccaaagatgctagtgaacatgcagtcacagataaaagacatctcctatatagaatgccttacacaggtatttttttttaatatttttgctggaatggataattttttactcactttaatggcttatgatcgctttgtagccatctgtcaccccctcaactacactgttattatgaaccctcgactgtgtgcacttctgattctgatgttttggatcataatgttctgggtgtccctgattcatgttctgttgatgaatgaactgaacttctccagaggcactgaaattccacatttcttctgtgaactggctcaagttctcaaggtatccaactctgacaatcatgtcaataatgtcttcatgtatgtagtgacttccttactgggtgtgattcctatgacaggaatccttatgtcttactcacagattttctcatccttatttaggatgtcctctactgtgagtaagtacaaagctttttccacctgcggttctcacctctgtgtggtcactttattttatgggtcaggatttggagtttacttcagctcttctgtggttcattctactcagagaagaaaggttgcttcattgatgtatactgtgatcagccccatgctgaaccccttcatctatacgctaagaaacaaagatgtgaagggcgcccttggaaaacttttcaacagagttgcttcttcaccatcatgtatc

SEQ ID NO: 1243 - DNA, 954 bp, Mus musculus
  MOR110-10
atgaagaaccaatctgtagagattatattcattttacttggactgacagatgaccctcagctacaaattctgattttcctgtttctgtttttcaattacatcttgagcctgatgggaaacttagtgatcatccttctcaccctgctggatcctcgcctcaagactccaatgtacttcttcctccggaatttctccttcttagaaattgcattcacaactgcctgtattccacggttcttgatgagcattctcactggagacagaacaatttcctacaatgcttgtgcagctcagttcttcttcttttctctattactagtcacagagttctacctcctggctgccatgtcctatgaccgatatgtagccatctgcagaccactgcactaccccatcatcatgaacaacagaatgtgtcacctactggtcctcagctgctgggtgactgggttcttaatcatcttaccccctttagtgttgggactcaaactggatttctgtgcctctaaaacaatagaccacttcctgtgtgacacttctcctctcctgcaactgtcttgtacagacacacatttcatggaattgatggcttttgtcatagctctcatgacacttgtcatcaccttgatcttagttattctttcctacacactcattatcaaaaccatcctaaagttcccttcagctcaacaaaggaaaaaggccttttccacctgctcctcacacatggttgttgtctccattacttatgggagttgtatcttcatgtacatgaaaacatcagccaaggagagggtagctttaaataaaggtgtctctgtactcaacacctctgtggcacctttgctaaaccctttcatttacaccctaaggaaccagcaggtaaaggatgcttttaagcaggtgcttcaccgactgtattctcacaacagtgaattaagatttagacctaaa

SEQ ID NO: 1244 - DNA, 936 bp, Mus musculus
  MOR114-12
atgagaaaccacacttcaattacaacattcatcctcctgggactcactgatgatcctcagctgcaggtcttgctttttatttttctatttatcacctacctattgagtgtaactggtaacttaactatcattaccctcactacagtggatccctaccttaaaactccaatgtatttcttcctccaaaatttctctttcctagaaatctcatttacaagtgcctgtgtcccaagattcttatacagtatttcaactggagacagaacaattacatacaatgcatgtgcaactcaactattttttacagatctctttggggtaactgaattttttcttctggctatcatgtcatatgaccgctacgtggccatctgtaaacctttgcattatatgaccatcatgaacaacaaggtgtgcagaataatggttatctcctgttggatggcagcattcatgattatcctcccacccctgagtttggggtttcacctggaattctgtgactctaatatcattgatcattttggatgtgatgcaaaccctattttgaaaatatcgtgctcagacacgtggttaattgagcagatggtaataggctcggcagtattgaccttcatcattactcttctatgtgtagtcttttcatacatgtacatcataaggacagttctaaaattcccttctgcccaacaaaagagaaaggccttttctacctgctcttcacacatgattgtggtttccatcacctatggcagctgcatcttcatctacgtcaaaccgtctgcaaaagaagcggtgaccattaataaaggtgtgtctgtgcttatttcttccatatcacccatgctgaatcctttcatatatactctaaggaacaagcaagttaaacaagcttctcaggacttaattaagaaaattgcatttctcttaaagaag

SEQ ID NO: 1245 - DNA, 941 bp, Mus musculus
  MOR110-11P
atgaaaaatcagtcaatggaatttgacttattcttttgggattgacagatgacccacaattacaaattgtagtttttctgtttctctttctcaattatgtgatgagcctggtggggaacttaatcattgtgcttctcaccctgctggaccctcgcctcaaaactccaatgtatttctttctccgtaatttctcctttttggaaatcatgttcacaacagtgtgtattcccagattcttgacgaccattgtgactggagacaaaactattacttataataattgtgcagctcagttgtttttcattcttttgctgggagtcacagaattttatctcctggctgccatgtcctatgaccgctatgttgccatctgcagaccactgcactaccctatcatcatgaacagcaaagtgtgccaccaactcgtcctcagctcctgggtgactggattcttgatcatctttcccccattggccatgggtttgaagctggatttctgtgattccaggataattgatcatttcatgtgtgaaacttctcctattttacagatctcctgcacagacactcatgttctagaaatgatgtcctttgtcttagcagtggtgacacttgtagtcacactggtactagtgagtctctcttactctttcatcattaagactattatgagtttcccttctgcacagcaaagaaccaaagccttctccacctgcacttcccacatgtttgttgtctccataacatatggaagttgtatcttcatgtatattaaaccatctgcaagggagagagtgtctgtgtctaaaggtgtagctctgctgtatacttcaatcgcccctctcctgaaccccttcatttatacactaagaaaccagcaggtgaaagaagtcttctgggatgtattacaaaagactttgggcttttcaaaacacaaattt

SEQ ID NO: 1246 - DNA, 939 bp, Mus musculus
  MOR130-2
atggagaaggaaaaccaaaccagcgtctctgagtttctcctcctgggtttttcaagttggccagggcatcaagggcttctctttgcactcttcctatgtctctatttaacaggactatttggaaacctcctcatcttgttagccattggttcaaacaatcacctccacacacctatgtatttcttccttgccaatttgtccttggtagacctctgccttccttcagctacagtccccaagatgctattgaacatccaaaccaagtctcagtccatctcctaccctggatgcctggctcagatgtatttctgtatgatgtttgctaacatggacaacttccttctcactgtgatggcatacgaccgctttgtggccatctgccatcctttgcactacactaccattatgaccccatgcctctgcacatctctggtggctttctcttgggtcattgccacttttaatcctctcttgcataccctcatgatggcccgacttcatttctgctctgaaaatattatccaccatttcttctgtgacatcaactctctcctccctctctcctgttctgataccagtctcaatcagttgatggttctgtctgtggtgggcctgatatttgtggtaccatcagtttgtatcttagcttcttatggtcgcattgtctctgctgtgatgaaaattacttcaatggaaggaaagctcaaagcattctcaacctgtggatcccaccttgctttggttattcttttttatggagccattgcaggaatctatatgagcccttcatccaaccattccactgaaaaagattcagctgcatcagtaatttttatggttgtagcccccgtattgaatcctttcatttacagcttaaggaacaatgagctgaaagggactttaaaaaagactcttggccagagcaaaatatgttccaag

SEQ ID NO: 1247 - DNA, 840 bp, Mus musculus
  MOR174-17P
ctgttaacattgatggggaacctgggcatacttgtggttataaaggttaaccccaaacttcacactcccatgtacttttttcttaaccacctatcatttttggatatatgttattctagtgtatttacacccaaacttttgcagatattgattatggaagatgggaccatttcttttataggatgcatgatacaatttttctttatttgtacattcgtgattacagaaatattcatgttagcagtgatggcttatgacaggtttgtggctgtttgcaatcccctatactacacattaattgtaatgcctatacaattctgtgctctgctagttgctgggacatatatgatcagtggactatgtactttgataattctatatactcttttgcaactctgttattttgaacatggcatcatcaatcactttggctgtgaatactctgctgtcatctctgtgtcttgctctgattcctcctttagccagttgatatgcttagtcatgtctattgctagtgaattttctagtgtcctgatcactttagcctcatatgtgttcatagttgtcactattataaagatgccttccaaaggaggactacagaaagccttctccacctgtacttcccacctgactgccataacaattttccatgggatcttactactcctgtactgtattcccaactcaaacagctcacggctctttgtcaaagtggccactgctctttatacaatcatgatccccatgttgaacccccttatctatagccttagaaataaagatgtgaaggacacagtcaggagacttatcagctcaaaactgcactctcacttgaca

SEQ ID NO: 1248 - DNA, 939 bp, Mus musculus
  MOR174-18
ctctatagcattcaagaaaaccagagttctacagtgaccttcatcctcgtgggcttctcagaatacccagacatccagttgcccctgttcctcctgttcctgaccatatacacagtcactgtgctggggaacctgggcatgattgccatcatcagacttagccctaagctccacactcccatgtatttttttcttagtcatctctcctttgtggatttctgttactccactgttgtcacaccaaagctcttagaaaacttgattgtggaagacagaaggatctcctttacaggctgtgtcatgcaattcttctttgtatgcatatttgtggtgacagaaacattcatgttggcagtgatggcctatgacagatttgtggcagtatgcaaccctctcctctacacagtggctatgtctcagaagctttgctggtccctggtagcaggatcctattcatggggtataatctgttcctttgtattcatacattttatgttgaccttggtcttctgtgggaccaagttcataaataactttgtgtgtgagcatgatgccattgtcgctgtatcctgctctgaccccttcattagtcagaaggtcattttcatctttgcaactttcaatgagctaagcagtctgatgatcattctcacctcttatgttttcattgtcatcactgtcatgaaaatgcctaccactggagggcgctacaaagtcttctccacttgtgcctcccatctcactaccatcactattttccatagcattattatctgtctctactgtgttcccactaccaaaagttcttggcttctggtcatggtggcctcagtcttctacacagttgtcatccccatgctgaacccacttatatacagtctcaggaacaaggatgtgaaggatgcagttaagaaactaatgtgttcttctttgtcatca

SEQ ID NO: 1249 - DNA, 936 bp, Mus musculus
  MOR174-19
caactcagggaccgaggaaatcagactaattcagtgatcttcattctgttgggcttctctgaatacccggatctgcaggtgcccctgttcttcgtgtttctgatcatatacacaatcactgtactgggaaacctgggtatgattggcatcatcaggatcaatacaaagctccgcagtacccccatgtactttttccttagtcatctttcctttgtggatttctgttactctactgttgtaacacccaaactgttagaaaacttgatcatagaagacagaaccatctctttctcaggctgtattatacagttcttctttgcatgtacatttgtggtgaccgaaacgtacatgctggcagtgatggcctatgacagatttgttgcagtgtgtaatcctctgctctacactgttgccatgtccccaaagctgtgttccattttagtgggtgcctcatattcttggggtttaatctgttccttgacacttacttactttttgctgagattatcctttcaaggtattaatataattaataattttgtgtgtgagcatgctgctattgtggctgtatcctgcagtgacccttacattagtcaggaaattatttttgtctctgcctcatttaatgaaataagcagcctaattattattcttacttcctatgttttcatcttcatcactgtcatgaagatgtcttccattggaggccgaagtaaagctttctctacatgtgcttcccacctgactgccattattatttttcatggaacaattctatttctctactgtgtacctaacacaaagagttcttggctcatggtcaaggtggcctcagtgttctataccgtcttcatccctatgttaaaccccttgatctatagtctcagaaacaaagatgtcaaggagtcagtcagaaagttggtgaccaaaagttta

SEQ ID NO: 1250 - DNA, 939 bp, Mus musculus
  MOR149-3
atggaacctggaaaccaaacaggtgcatattacttttatctgactgagctaaccagtgatcctacaatggagctcctcatatttagcctcttcttgtttatatatctggtcacaattctgggaaatttgctcatcatcattgctgtcagctctgactctcatctacaaacaccaatgtatcactttctctccaaactttcatttgctgacatctgcctaagcacaactaccattccaaatatgctgaagaacattcacacacaggatcagagcatcagttacacaggttgcctcattcaggcctgctttgttctgaattttgctttagtagaaagctgtatccttgctgcaatggcctatgaccgctatgcagctatttgtcatcccctgaactacacagtaattatgaatccccacttctgtgatctgctaattctactgtccctgatcattagtattgtgaacagcttattacagtgtctgatgatactgcgactatcattttgcacaaataatgaacttcctctgttcttctgtgagcttgctcaagtcatcaagcttgcctgttctgatactctcatcaattatatcctcatatatcttgcaacatttatatttggtggaattccaatctttggaatcattttctcttatactcgaattgtttcttctattttgaaaatatcttcccttagaggaaagtacaaagccttttctacttgtgggtctcacctttcagttgtctcgttattttatggtgcaggagttggagtttatattagctcttcaattgctgttttccctcagacaactacagtgtcatatattatgtacacagtgctccctcaaatgttgaacccttttatctatagcttaaggaataaagatatgaaagaagccttacgaaagctcattgctaaggaatcaagacttccctga

SEQ ID NO: 1251 - DNA, 927 bp, Mus musculus
  MOR250-7
gtgttattgaatcacacatttatcactgaatttctcctcttgggggtgacagacatacaagaattgaaccctattctttttgtcatggtccttgccatgtactttataaatgtgtttgggaatggagccatcatgatgattgtcatcttggattcaagactctactcacctatgtatttcttcctgggaaacctagcatgtctagatatctgcttctccactgtaacagtgccaaagatgctagagaacttcttctccacaagcaaagcaatttccttcttgggatgcataactcaacttcatttcttccacttcttgggatgtacagatgccctgctgttgacagtcatggcatttgaccgctttgtggctatctgcagaccactccactacccttccatcatgaaccgtcaggtctgcattcaggtggctgctaccatatgggcaattccttttcttcatgcactggttcactccataatgacgtctcaattgaacttttgtggttccaaccgcatccatcatttcttctgtgatgttaagccattattggagctggcatgtggaaacactgaactcaacaggtggctgctcaatactcttgcagggaccattggtattggcctcttctttctgacatttttatcctatttctacattgtcacctatctctttctgaagactcattcctgcagcatgctgcacaaagcactgtccacctgtgcctctcacttcatggttgtcatgattttctatgctcctgttctctttatctatatcaatcctgattcagggagctccctggaaaaggacaggatcattgctgtcatgtacactgtggtcacccctgcactcaacccacttatctatgctctgaggaacaaggaagtgaggtgtgctttgaataggaaactcaggatactgatt

SEQ ID NO: 1252 - DNA, 915 bp, Mus musculus
  MOR160-4
atgaggaaccacagcgctgtccatgagtttgttcttctaggactatccaccgacccccacattcaacctgcactctttgtcctgttccttctggtttacctcctcaccgtggtggggaactccctgatgttgcttgtgattgtggccgattcccacctccacacacctatgtacttcttcctgagacagctgtccttcctggatctctgtcactcctctgtcacggcgcccaagatgctcgagaatctactctctgaggagaaaaccatcttggttgaaagctgcttggctcaggccttcttcgtcttcgccaccggcggcaccgaggcctgtctgcttgcagcgatggcctatgaccgctacgttgccatcggttcccctttgctctacagccaggtgatgagtagccagctctgtgtggggctggtgtggctctcctggtgtctggctgttgtggatgctctcctcaataccctcccggctgtcagtttagatttctgtgaggaccaaacgatttctcacttcagctgtgagctgtcttctctcttccctctgtcttgctctgacaccgccgccaacttcacactcctgctctgctcctccgtcgtgcatttctttggaacgcttgtcatgattgtttgctcttatggccgcattgtcaccactgtcctgagggtcagctccagcacggggagaagcaaggccttctccacctgtttgtcccatctcactaccgtcatcttgttctatggctcggggtttatcagttatctcttaccggcttcagggtcccccctggagaaggtcttctctctgcagtacagcgtcatcacccccatgctgaaccccctcatctacagcctgaagaacaaggaggtgaaggcagcgctgggaagaatgatcagaaagcatttt

SEQ ID NO: 1253 - DNA, 936 bp, Mus musculus
  MOR160-5
atggcctggagcaaccacagcgtcatcacggagttcgttctcaccgggctctctgacgaccccctgatccaggctctacttttcgcgctgttcctggggatttacgtcctcaccatgacggggaacctgacgatgctgctggtgatcacggctgactcccacctccacacgcccatgtacttcttcctaagtaacctgtccttcctggatctctgcttctcatccgtcacggtaccgaagctgctgaaggacctgctgtctgctaagaaaaccatctctgtagagggctgcctggctcaggtcttcttcgtgttcatcactgcgggaaccgaagcctttcttctgtcaatgatggcgtacgaccgctacgcggctgtctgccacccgctactctatgggcagatgatgagcaacgaactctgtctgaagttggttttgctctcatggggcctggcctctctcagttcagtagtcattgtgctcttggcggtgaacctggacttctgcgaggcctacaccatacaccactacacgtgtgagttaccctctctctttcctttgtcttgctcagatatctccatcaacgtggacatcttgatctgctctaccctgctgcacgggctggggacctttctcccaatcttcttttcttatgcccgcattgtatccaccgtgctgagcatggaatccaccacggggagaagcaaggcgtttaacacctgctcttctcacctcatagccgtggtcctgtttttcgggtccggcttgattcgttatcttatgcccacatctggctcttctctggacttgctctcttccttgcagtacagcgcagtcacgcccatgctaaatcccctcatctacagcctgaagaaccaggaggtgaaggccgctgtgagaaggacattagggaagtgcctgcgatacttggagtga

SEQ ID NO: 1254 - DNA, 951 bp, Mus musculus
  MOR224-12
atgaacatgacaaacaacactatggtgacagaattcaccttgctgggcatccctgagacagagggcctggagaatgtcctactcttcctgttctcaacattatatgcctgtgccttgctgggaaacttgctccttcttactgcagtcacctcctccccacgactccacacacccatgtactttttcttgagcaacctctctatctctgacatgggcttctgttccactacagctcccaagatgttgtcatatctctcaggaaggggtggggggatttctttccagggatgtgttgtacaacatttcttctatcattgtattggatgcgttttgtgcttcctgtacacagtgatggcctatgatcgctttgttgccatatgcttccctttgagatacacaatcatcatgaaccacagagtatgctgtgtcttggccacagggacctggatgagtggctgtgtgcatgccaccatcctaacttgcctcactttccagttgccctactgtggccccagtgaggtgagttattacttctgtgacatgcctgcagtgttactgctagcctgtgaagattcctctctagcacagagggtaggtttcacaaatgttggtcttttatctctcatttgtttctttctcattgttgtgtcctacactcgaattgggatctccatctcaaaaatccgctcaacagaaggcaggcagagagcgttctccacctgcagtgctcacctcacagccatcatgtgtgtctatggaccagtcatcgtcatctacctacagcccaaccccagcccattgcttagtgcaattattcagattttcaacaatcttgtgacacccaccatcaacccattgatctacagcctgaggaacaaggatgtgaaagcagccctgaggcatgtatttcttaagagatgtcttagcctggaagtaaatgaaaacatctaa

SEQ ID NO: 1255 - DNA, 948 bp, Mus musculus
  MOR102-2
ctgagcccggagaattccagcaccatcaccgagctagtccttgtggggttttctgatcaaccccagactgagcttcctctcttcgtcttcttctctctggtctacctagccagctgtttggggaatacagctgtggtcatattagtggctctcgatgtctctctgcagacacccatgtatttcttcctctgccacctagctttcctcaatggattcttcggcacggttgtgactccaaagatgctcttcaatttccttgcaagcaggaaggtcatatcttacccattctgcctggctcagacctacctcaccctgttcttggagtcgaccgagtgctttctccttgccgtgatggccatagatcgctacgtggccatctgctacccactgaggtaccttctcatcatgagctgggcagtgtgcatagcactggcagtggccgtgtgggtcacaggtttttgtgcctcggttttacctctctgcttcatgatcctcccactctgtggcccttacgttgttgattatcttttctgtgagctgcccatccttctgcacctgttctgtgcagatacgtctctgcaggaggccatgatggccgttggaggggctggcacagtgctggttcccttcctcctgattgcgctctcctaccttcgcatcctggtgactgtgataagaatagactcggctgaggggagaaagaaggccttttcaacctgtgcctcgcacttggctgtggtgaccatctattacggaacggggctcatcaggtacttgaggcccaagtccctttactccgccgagggagacaaactgatctctgtgttctatgcggtcatcggacccgcgctgaatccattcatctacagcctgcggaacaaggaagtgcagggcgctgtgaggagagtggtggagagatacaggaaaagcccaagaattgccttctag

SEQ ID NO: 1256 - DNA, 933 bp, Mus musculus
  MOR267-15
atgggcaatcacagcacagtgactacattccttctgtggggtttttccagcttcccagagctacacaatctactctttgttgtgattctcctctcccatgtgactattcttctagcaaatgcatccatcatggtggccatcaagctcaatcacaaccttcacacccccatgtactttttcctctttgccctgtccttttcagaaacatgcaccactatggtgattttgccccgaatgttagtggacttgctatcagagagcaaggccatctctctccctgaatgtgctacccagatgtttttcttctttggactagctgccaacaactgtttcatcatggctgccatgtcctatgaccgttacactgccatccacagcccactgcattatcatatctttatgaccccaaaggtctgctctcagctggtaatagcttcctgtgttgttgggttcctttgttctcttagcatcaccttcactatattcaacttgtctttctgtgactccaagactatccagcactttttctgtgatatttcacccctggttcaccttgcctgtgattacactgctcatcatgcaatgattatttttatggtctctgcatttgtgctggtgggcagctttgttttaatcatgatttcctatgccttcatagtattccttgttgtaaaaatgccttctgtacaggggaggcataaggctttctcaacgtgctcctcccacctcacagttgtttctatgcactatggatttgcctgctttgtctacttgatacccaagaacagtgactccttccgtgaagacatgctgatggctgtcacgtatacagtactgacacctctgctcaatcccattgtttacagcctaagaaacaaagaaatgcagacagccctgaggaaggtactaagcagtatcaataaaatgttacct

SEQ ID NO: 1257 - DNA, 969 bp, Mus musculus
  MOR246-6
atggataacaccaattattcagtggtgtctgagtttgtgttacttggactctctagttctcgggaacttcagattttctactttgttttcttctctatgctttatattgtcatcatattaggaaaccttctcatcatcatagctgtgacttctgacagcagcctgcactcaccgatgtatttcctcctgggaaacctttccttttttgacatttgtcaggcttcttttgctacacctaaaatgattgtagactttctgagtgaacacaagactatatcattcagtggctgcatagcccaaatttttttcattcacctctttacaggaggagagatggtaatcctagtttccatggcctatgatagatatgtggccatatgcaaacctctacattatatgaccatcatgaaccaaactacatgtactgccttggtagtaatctcttgggctgtgggcttggtacacacattgagccagttatcatttactgtaaaactgtcattttgtggacccaatgaagtagacagctttttttgtgatcttcctcgagtggtcaaactcgcctgcattgactcatacattactgaaatacttattgtggtaaacagtggaattctttccttaagcactttctctctcttagtgagctcctatgtcataattcttgtcacagtttggttcaagtcctctgctgccatggccaaggcattttctacactggctgctcacatcatggtagtagtattattctttggtccttgcatcttcatttatgtgtggccatttactacctatcctgtggataaaattcttgctatattttatacagttttcactccgatccttaatcccattatttacacactaagaaatagagacatgaaagctgtcatgggaaaaattgctgctcattatctcagacctcccaaagtagctgaaatgtcatttgtagccagaatttctctttat

SEQ ID NO: 1258 - DNA, 966 bp, Mus musculus
  MOR208-4
atggccacagctgtccacagaaatggaagccttactccagtgtccttgcaggccttcgtgctggtgggatttgggggaggtgcagagacccaggccctgctctttgctgtcttccttgtcctgtacatggtgaccgtcctgggcaacctcaccatgattgtggtcatcaccctggatgcccgcctgcactcccccatgtacttcttcctcaagaacctgtcctttgttgacttctgctactcctctgtcattgcccccaaagcaatggccaacttctattcctccaaagtcattggagttgctggttgtgctgcacagctgtttttcttctcctttctgggaacaagtgaggctttacttcttgctgtgatggcctatgaccgcttcatggccatctgcagtcctctgcactacccagtgaccatgtcctccacagtctgtgcttgccttgtgctggctgcctactttggaggttgcctcaactccattgtggagaccagcctcacttttcaacttcccttctgtggctccaatcacatcgaccatttcttctgtgatgtgcccccgctactccagattgcctgtgccaacacctctgtcaatgagctggtaatgtttgccatctgtggtttcattctaatgggggcaacattagtcatcctgatttcatatggctacatcactgtgaccatcctcagcatgcactcgggatccaggaggcacaaggtcttctctacctgtggctcccatttgacagctgtgtccttgttttatggaactgggattgctatatatggccagccaggaggtttggcatctaaagagcaaggcaaggtggtctccatcttctacaccctggtcatccccttgctcaaccccctcatctacagtctgcggaacaaggatgtgaaggatgccctggagaggctgagacagagacagagacagaaacatgcagctatataa

SEQ ID NO: 1259 - DNA, 957 bp, Mus musculus
  MOR208-5
atggccacagcagtgcacagaaatggaagcctcactccagtgtccctgcgagtgtttgtgctggtgggatttgggggaggtgcactgacccaggccctgctctttgctgtcttccttgtcctgtacgtggtgactgtcctgggcaacctcaccatgatcgtggtcatcaccctggatgcccgcctgcactcccccatgtacttcttcctcaagaacctgtcctttgtcgacctctgttactcctctgccattgcccctaatgccctggccaactttctctccacctccaaagtcatcagctttgaggcttgtgccactcagttcttcttcttttccttgttggctaccactgagactttcctcttagctgtgatggcctatgatcgtttcatggccatctgcagtcccctgaggtaccctgtgaccatgtgccctacaacctgtacccgtctggtcctgggtaccttctgtgtgggctgcctgaactccattgtgcagaccagcctcacgttccagctgcccttctgcagctccaaccgtattgaccacttctactgtgatgtgcccccactgcttcagctggcctgcgccagcacggctctcaatgaactctttctcttcggcctctgtgggttcatcattgtgagcaccaccttagctgtcctggtttcctatggctacatcaccgtgaccatcctcaggatgcactcgggatctgggaggcacaaggtcttctccacctgtggctctcacctgacagcggtgtctttgttttatgggactctatttgtcatgtatgcacagccaggtgctctgacatccatggagcagggcaaagtggtctccatcttctacactctggtcatccccatgctcaaccccctcatctacagtctacgcaacaaggatgtgaaagatgctctgcagaggttaggacagagacacagccttgtgaag

SEQ ID NO: 1260 - DNA, 942 bp, Mus musculus
  MOR256-49
atgggcacagtttgcaatgacacccatggtgatttcatcctccgtggcttctctgacaagccatatttagagaaggtactttttggggtaattttggtcttttattgtttgactcttgctggaaatacaatcataatatttgtttccttgaaggacccaaaactacagatccctatgtatttcttcctttccaatctttccttattagatatttgtttcaccagcagctgtgttcctcagatgttggttaatttgagaagtccaaagaaaactatcacctatagtggctgtgccactcagctctacatcttcctgtggcttggtgccactgaatgtgtgcttcttgttgtcatggccgtggaccgctatgtggcagtgtgccatcctctgagatatgtaactgtcatgcaccctaaagtatgtctgcagctggctgtccttgcttggggttctggcttgattcagtctctgatccaatctactgctaccctcaggttgcccttttgctctcagcgggtagtagataacattgtgtgtgaagttccagccctgattcagctgtccagtgcagatactacctacaatgaagtgcagatgtccatagccagtgttatcctcctagtgttacccttggccattatcctttcctcctatggtgctattgtgaaatctgttttgaagataaagtcacctgcagggcagaaaaaagcatttggcacctgtacttctcaccttcttgttgtttccctgttctatggtacagtaacaggtgtctatcttcaacccaagactcactatgctcatgaatggggaaagtttctcacacttttctacactgtaataactccaactcttaaccctctcatttatacactgaagaacaaggaggtaaaagaagcagtgataagactgtggtggaagacttggatttcacaaagataa

SEQ ID NO: 1261 - DNA, 936 bp, Mus musculus
  MOR280-1
atggcagaggagctctggaatcattcctccctgtccagcttcatccttgccggcctgttcggccactcaccttatgactctttcttcttctccctggttcttctggcctttggggctgctgtggttggtaacatcctcctcttgatggtcatccaggtggatagacgcctgcacacccccatgtacttcttcctcagtcagctctccatcatggacttgactatgacatgcacagtggtacccaagatggcaaccaactttctctcaggcgggaagctcatctcgctgggaggctgtgcgtctcagatcttctttgtagttactgtaggaggtgctgagtgcttcctcttggccgtcatggcctacgataggtatatggctgtctgctacccactgaggtaccctgtactgatgaactggaaggcctgctctttcttggccacggcatcctggatgggtggcatggcagacagtgtgattgatgtgggtgtggtctttagctttccctattgtggatctctagaggtggaccacttcttctgtgaggttcctgccctgttgcgcctctcctgtgcagacacctcactatttgaggacctcatctatgcatgttgtgtggtgatgttactgctgcctcttggggtcattgtggcatcctatgctcgggtcctcacaactgtgatgaggatgccctccactgaggggaaacagaaggccctcaccacttgctcttcccacctggccgtggtgggcctctactacgggggagccatatttagctacatgcagcgagcctcggctagaacaccactgggggatagagccacctccatcttctacactattgtcaccccaatgttcaacccacttatttacagtctgaggaatagggaggtaaccagtgccctgaagaagatgctggagaggtggggcatg

SEQ ID NO: 1262 - DNA, 928 bp, Mus musculus
  MOR256-50
atggatagtttcaatgccacgttagaagagagattctttttggtgggcttttcagattggcctcagctggaactcatcctttttgtttttatttcaattgtctactccctaactatctttggcaacactaccatcattgctctctcccgaatagaccttcgactgcacacccccatgtacttcttcctctcaaatctctcctttctggacctctgcttcaccaccagcaccgtgccccagctcctcatcaacctctatggacaagacaggaccatcagctatggagggtgtgtggcccagctgttcatatatcttgctctgggatccactgagtgtgtgctcctggtagtgatggcttttgaccgctatgctgctgtgtgtcgtccactgcactacacaaccatcatgcacccccttctctgtcaggcattggctcttgcttcatgggtaggaggattcttgaactctctgattcaaacaggcctcatgatgaccatgccactctgtggacatcgactgaatcacttcttctgtgagatgcctgtcttcctcaagttggcctgccaggacacaggaggaacagaggccaagatgtttgtggccagagccataatcttggtcttccctgcaacattaattcttggctcctatggacacattgctaaagcagtactaaaggtcaagtcaacagctggacgcagaaaagcttttgggacatgtgggtcccacctcctggtggtttccctgttttatggctcagccatttacacatacttgcaacccaagagcagttattctgagagtgagggggaaatttgtggcccttttttatactattgtcacccccatgctcaaccctctgatctataccctgaggaacaaggatgtgaagggggctctgtggaaggtgctagggagaggcacagac

SEQ ID NO: 1263 - DNA, 963 bp, Mus musculus
  MOR217-1
atgactccatttgaaatgaccaatcacacacgtgtcacagaattcatcttcctgggattttccaaccaccccaacctacagggtgtcttcttcctggccttcctggccatttacctgacaactctcctggggaacacactcatgatagtggccaccagggtcagccctgcactccacactccaatgtactatttcctcagcaacttgagcttcctggacatctgctacacatctacctccattccagtcatgctagtgaacttcttcagggagaagaagaccatctcctttgagggctgcctctctcagatcttcttctttgtgtcatgtgctggaactgaatgtgtcttgttggctgccatggcatatgaccgctatgtggccgtttgtcaccctcttcggtatccagttctcatgagcacaagggtctgtatcagcttggtgactggatcctggctctgtggcttggtgaattctgtgactcacacagtattgacaagcacacttactctgtgtggccccaaccaaatcagccacttcctctgtgatgtcccattgctcctgaagctctcctgctcagacacctctgtcaatgaatctgtcctccatgtgtccagtgccactgttggcctgagtccctgcctgttcactgcaggctcctatatactgatcatctctgccatcctgaggattccctctactcagggcaagagaaaggccttctccacctgtgcctcacacctcactgtggtggtggttttctttggaacagccaacttcaactatgtcagacccaaggaaggctactccctggacatgggcatattagtgtctgtgctctactgtgttgtgacccccctgtttaatcccatcatctacagcctgaggaacaaggaggtcaaaggtgcgctgagaaaactgactggagtgccttccttaacaatagcagtggctagagagtaa

SEQ ID NO: 1264 - DNA, 966 bp, Mus musculus
  MOR225-12
atgtggattcaactagaattcatggaaaatcataaaaacatcacagagttcatttttatgggtctttgggagaatagacaaatagagttgctgttctttttcttgttcctgctttgctacctagctgtcttaatggggaactccgtcatctttctcaccatcacctgcagccacctaatcgaacaaccaatgtattattttctctgccatctttccctcatggacctctgctacccctccactgtgattcctaggctcatcagggacttggccgcaacaagaaaaaacatttcctataatgagtgcatgacccagctcttcactgcccacttgctggcaggtgtggaaatcttcatcctggtgtccatggccttggaccgctatgttgccattgtcaagcccctgcactacatggttatcatgagcaggaagagatgtgatatgttgattgtcacggcctggatactggggttctggcactccattgctttactactgatggtgctcagtctgccattctgtggtcccaaccacatcaatcactacttctgtgacattaagccgcttttgaagctggtctgtaaagatgttcatgttgttagtatcttagcaattgttaactctgggatggtgctttttgccatttttattgtactacttgcctcttacatactcatattgtattctctgaggacaagatcatctgcagggaagtggaaagtactctctacctgtagctcacacataatggtggtagttttattttttgggccctgtatttatacctatgttttacctgcaggaagtgagaacaaggataaggaaatttctgtgttttacactgtgattgcccccatcctaaatcctgtcatctacacactgagaaacagtgagatgaaaagtgccatgcacaaagtgtggtctcggctgtcaaatttggggttgaaatacgtgaaaccatcttgt

SEQ ID NO: 1265 - DNA, 936 bp, Mus musculus
  MOR245-21
atggataaagccaatcactctgttgtgtctgagtttgtgttcttgggactctccaatagatggggaatccagttgcttctcttcctcttttcctccatgttctacatagcgagtgtgatgggaaacctcctcattgtgttctccgtgactgctgactccaacctgcattcccccatgtacttcctgctggccaatctctcatttcttgaccttggagtttgctctattgcagcacccaagatgatttttgacctttttagaaagcacaaagccatctcatttggaggttgtataactcagatcttctttattcatgctattgggggcacggaaatggtgcttctcatagccatggcctttgataggtatgtagccatatgtaaacctcttcactacttgaccatcatgagaccacaaatatgcattttaattttggcagtatcctgggtccttggacttattcactcagtggcccaactagcttttgttgtagacttgcccttctgcggacctaatatattggacagcttttactgtgatcttcctcagcttattaaacttgcttgcacagagaccagtaaattggtgttcatggtcacagccaacagtggactcatctctgtgggctcctttttcatactcatcatttcttacatcttcattttggtgactgttaggaaacactcttcaggcagcatagccaaggccctctctactttgtcagctcatgtgactgtggtggttttgttctttggaccactaatcttcttctacacttggcccttcccttcatcacacttagacaaatttcttgccatttttgatgcagttctcaccccttttctgaatccagtcatctacacattcaggaacaaggaaatgaaggcagcaatgaggaaactctgctcccagcttgtgaattacaggaaggtctcc

SEQ ID NO: 1266 - DNA, 897 bp, Mus musculus
  MOR245-22
tccaaactattcctttttgtcttctcttccatgttttatgtagcaagcatgacaggaaactctctcattgtcttcactgtggcatctgaccctcatttacactctccaatgtactttctgttggctaacctgtcttttattgacttaggtgtatcttctgttattgcccccaagatgatttatgatctctttagaaagcataaagtcatctcttttagaggttgtgtcactcaaatcttcttcattcatttcatcggtggtgtggagatggttttactcatagccatggcctttgacagatatgtggccatatgtaaacctcttcattatctaatcattatgaggccaaggatgtgcatcttgtttatagtggcctcctgggtggttggctttatgcattctctggttcaactggcttttgtagtaaacttaccattctgtggaccaaatgtgttggacagtttctattgtgactttccccggttcatcaaacttgcctgtatagacacatacagactgaagttactggtcttagtcaacagtggattcatgtcggttgggtccttcttcatattgatcatttcctatgttgtcattatatttattgtccataaacactcttcaagtggttcctccaaggctttgtctacactttcagctcatgttatggtggttgtcttattctttggtcctgtgatgttcatctatacatggccttcttctttaacacatttggataaattcctacctatatttgatgcaatcgtcactccctttctgaacccagtgatctatacattcaggaatcaagaaatgaaaatggcaatgatgagagtacttagacagataatgggttacagacaaattattaaacacttgcaccctgatcagtcttaa

SEQ ID NO: 1267 - DNA, 870 bp, Mus musculus
  MOR245-23
aatatccaactgctgctctttctgttatcctcagtgttgtatgtggcaagcatgatgggaaactgtctcataattttcactgtggcttctgaccctcagctacattctcctatgtactttcttctgtctaacctctccttcattgatataggtatttcttctgccacttcacccaagatgatttatgacttattcaaaaagaacaaagtcatctcctttagaggttgtattattcaaatcttcttcatccatgcaattgggggtgtggagatggtgctgctcattgccatggcctttgatagatatgtggccatatgtaagcctcttcattacctgaccatgatgagcccccagatgtgcatcttctttttaattactgcctgggtagttggtcttatgcactctgtgatacaactggttttcatagtaaatttacctctctgtggtcagctattggacagcttctactgtgaccttcctcaattcatcaaacttgcttgcatggacacatatagactggaattaatggtctcaatcagtagtggattcatgtctgtggctttcttcttcatactgatcatttcctatgttgtcatcatatttactgttctgaaacactcttcaagtggttcctacaaagcgctgtctacactttcagctcacgtgactgtagtagtcttattctttggtcctgccatatttttctatacatggccttcttcctctacacacctggataagtttctggccctatttgatgcagttgttactccctttttgaaccctgtgatctacacattgaggaatcaagaaatgaagatggcaatgaggagagtattcagacatctaatgggctatagacaaatctct

SEQ ID NO: 1268 - DNA, 930 bp, Mus musculus
  MOR261-13
atgacagagaaccagacatggatcccagaatttaccctgcagggattcctcctcagcccgcggatgcagatgctcctctgtggcctcttctccctgctctatactttcactctgctggggaacggagtcattctggggctcatctggcttgactgcagactccacacccccatgtacttctttctctcccacctggccatcgtcgatatttcatatgctaccaacaatgtccccaagatgttggcaaaccttcttgctaagaaaaaatctatttcttttgccccatgtataatgcagacatttttatacatggcttttgctcacactgagtgtctcatcctggtgatgatgtcctatgatcggtatgccgccatctgccaacccttacaatactctgtcatcatgagctggaaagtgtgcaccattatggctgttgcttcttgggcatgtggctccctcctagccctggtccacgttgttcttatcctgaggctgccattttgtgggctccatgaaatcaaccacttcttctgtgaaatattatctgtccttaagttggtctgtgctgacacaacactcaaccaaattgtcatctttgcaggttctgtatttatcttagtgggaccactgtgctttgtgctggtttcctacacacgtatcctgattgccatcctgaagatccagtcaggggagggtcgcagaaaggccttctcgacctgttcctcccacctctgtgtggtcgggctcttctttggcagtgccatcgtcatgtacatggcccccaagtcccagcacccagaaactcagcagaaggttctttccttgttttacagccttttcaaccccatgttgaatcccctgatctacagcctgaggaatgctgaggtcaagggtgctgtgaagagagtgttgtggaaacagagatcaaga

SEQ ID NO: 1269 - DNA, 924 bp, Mus musculus
  MOR171-46
atggccactgggaatcattctgcagcagttgtgtttgttttggtgggattaacacagcagcctgagctcctgctgcccctcttcattctgttcctgggcatctatgtggtgacagcagtggggaacctgggcatgatcctgctcatcacagtcagcccactgctgcatactcccatgtactatttcctcagcagcttatcctttgttgatctctcctattccactgtcattacacccaaaatgctggtgaactttcttgggaagaaaaatttcatcacttattcggagtgcatggctcagttctttttctttgcggtctttgtggtcactgagggttacctcctgactgttatggcgtatgatcactacgtggccatctgcagaccattgctgtataatgtgatgatgtcctctaaacactgcttactgttagtgctagttgccttcaccctaggccttttttctgctgtagtacacacaagtgctatgatgagtctgaacttctgtaaaacctacatcataagtcattacttctgtgatgctcttcctctcctcaaactttcctgctctaacacacatctcaatgagcttctcatatttattattggagggatcaacaccttggtgcccaccctagctgttgccatttcctatgtcttcatcttctgcagcatccgtcacatcaagtcatcaaagagcaggtccaaagcctttggaacctgcagctctcatctcatggctgtggggatcttctttgggtctatcactttcatgtatttaaagccttcttcaagtaactctctggagcaagagaaggtgtcttctgtgttctacaccacagtgatccccatgctgaacccattaatatacagtttgaggaacaaagatgtgaagaaagcactgggcagattctctgtaagaaga

SEQ ID NO: 1270 - DNA, 954 bp, Mus musculus
  MOR223-9
atgagaagaaacagaaacacatcgctggacgatgtggtgacagatttccttctcctgggcttggctcaccccccaaatctaagagccttcctcttcctggtcttcttcctcatttacatcctgacacagctggggaacctgctcatcctgctcactgtgtgggctgaccccaagctgcatgcccgccccatgtacattcttctgggtgtgctctccttcctggacatgtggctctcctcagtcattgttcctcggattatattaaacttcactcccgccagcaaggttatcgcatttggtggttgtgcagctcaactatattttttccacttcctaggcagcacccagtgcttcctctacactttgatggcctatgacaggtacctggcaatatgccagcctcttcgctaccctgtgcttatgaatgggaagttgtgcacaattctagtgtctggagcttgggtggctggctccatccatgggtctattcaagccactctgaccttccgattgccctactgtgggcccaaggaagtggactacttcttctgtgacattcctgcagtgctgagactggcctgtgccgatacgactgtcaatgaactggtgacctttgtggacattggggtagtggctgccagttgcttcatgctgattctgctctcctatgccaacatagttcatgccatcctgaagatacgcactgccgatggcaggaagcgtgccttctccacctgtggctcccatctcactgtggtcaccgtctactatgtcccctgtattttcatctaccttcgggcaggttccaagagtccctttgatggagcagttgctgtattttacactgttgtcactccattactgaatcccctcatctacaccctgaggaaccaggaagtgaagtctgccctgaagaggctaagagcaggtagaagggatgtggatggagagaag

SEQ ID NO: 1271 - DNA, 933 bp, Mus musculus
  MOR256-51
atggagaagaacaatgagagctctggggagtttattctcctgggcttctctgaccagccccggctggagatggtcctctttgttgtctgtacggtcttttattttctagctgtcacaggcaactcagccatcatcttcctctccctcatggacctccggctacacacacccatgtacttcttcctcagcaacctgtcccttcttgacctctgttacagcaccagtagcatcccccagttccagattaacctctggggcccacggaagaccatcagcttcgtaggatgtgctgttcagctctttgccttcctgtccgtggggggcatcgagtgcattctcctgtcagttatggcctacgaccgctttgtagctgtctgcaagccactgcattacctgaccatcatgcacccacagctgtgcctgaagctggcagcctttgcctggctcggtggcacagccagctcgacactgatgtccccactgaccatgtctctggggcggtgtggtcatcgccgtatcaaccactttgtgtgcgagatgccggctatcatccacatctcctgtgtggacacaagctggatagaaggcctaattttcatcctggccatccctattgttcttgtgcctctcattatgatcctggtctcctacggctacattgctgccgccgtcctgaggatcaagtctacagctagtcggcgcaaggccttcaacacctgctcgtcacacatggcggtggtgtctcttttctacagtagcatcatctacatgtacatgcagcctggcaatttggcaagccaggaccagggcaagtttctaactctgttctactgcctggtgacccccacgctaaaccctttcatctactctctgagaaacaaagacatgaaggcggccatgttgaaggttctgggaaaagatagaaacctgctc

SEQ ID NO: 1272 - DNA, 928 bp, Mus musculus
  MOR162-12
atggctttagcaaatgtctcttcagtgaaagaatttatcttgctgggcttgacacaacagccagagctccagctgccgctcttcttcttgtttttgggaatctacgtggtcctctgtgatggggaacttgggcttgattgttctgattgtgttgaatcctcacctgcacacccccatgtactactttctcttcaacctttccttcacagacctctgctactcctctgccataacccccagaatgctggtgggttttgtgaagcagaatatcatctctcatgcagagtgcttgactcagctctttttctttgccttctttgttattgatgaatgctacattttgacagcaatggcttatgacagatatgctgccatttgtaagcccctgctttaccaggtcaccatgtctcatcaggtctgcctattgatgactatgggtgtgtatgtgatgggctttgctggtgccttgtcccacatagtttgcatgctgagactcaccttctgtgatggcaacatcatcaataactacgtatgtgatgtacatcctctccttaaactctcctgctcaagtacctccatcaatgagctggtacttttcattgttgttggtgtcaatataacagtgcccagcctgactctctttgtttcttataccttaatcctttccaacatcctcagcatccattctggggaaggtaggtcaaaagccttcagtacctgtggctcccatgtgatagctgtttcttttttctttggagctgcagccttcatgtatcttaagccttctagtgcatctgtggatgaagataaagtatctactatcttttataccattctgggtccaatgctgaatcctttcatctacagtataaggaataaagatgtccacattgcactgaaaaaaactttgaagaaaaagatactcacc

SEQ ID NO: 1273 - DNA, 970 bp, Mus musculus
  MOR106-13P
aaatcttcagcagcccccagcaactccagcaccatcactgggttcatcctcttgggcttcccctgccccaggggaggggcaaatcctcctctttgtgctcttctccattgtctacctccttaccctcatgggcaatgcttccatcatctgcgctgtgtactgtgatcagaaacttcacatccccatgtacctcctgctggccaacttttctttcctggagatctggtatgtcacctccacagtccccaacatgttggccaacttcctctctgacaccaaggtcatctctttctctggatgcttcctgcagttctatttcttcttctccttgggttctacagaatgctttttcctggcagtcatggcatttgatcgataccttgctatctgcaggcctctacattaccctgctctcatgactgggcgcctctgcaacatccttgtgatcagttgctggatacttggtttcctctggttccctgttcccatcatcatcatctcccaggtgtcgttctgtgggtctagaattatagaccacttcctgtgtgacccaggtcctctgctagcactcacttgcaaaaaatctcccctaattgagctggtcttctctatcttaagtcctctgcctctcattattccttttgtcttcatcatgggatcttatactctggtcctagcagctgtattgaaggtcccttcagcctctggaaaaagaaaggctttctcaacctgtgggtctcatctggcagtggttgcattattttatggctcagtactggtcatgtatgggagtccaacatctgagcatgaagctgggatgcagaaaattgtgactctgttttactctgtcttgaccccactcctcaatcctgtgatatatagtcttaggaacaaacatatgaagatagccctgaaggaaattctgaggaagattaaaaattggtcaacaaaaaaggccttgggcaattaa

SEQ ID NO: 1274 - DNA, 967 bp, Mus musculus
  MOR128-3
atggcaccagaaaaccaaacaacagtcttggaattccatctcatgggactctcagaggatccagacttacagaccatcctctttggactgttcctgtccatgtatctggtcactgtcttcggaaacctgctcatcatcctagccatcatatcagactctcacctgcacacacccatgtacttcttcctctgcaacctgtccctggttgacatctttttttgctccactactgttcccaagatgctagtgaacatccagacccagagcagagctatctctttcacaggctgtcttgtccaaatgtatgcctttcacctctttgggactatagacagcttccttctggcagtgatggccattgacaggctggtggccattgcctacccactccgctactcagtgctcatgagcccacatgtctgcgcactactggtgggtgggacatgggttattactaatctccagtccttggtacacacttgtctcatggctcaactaaccttctgtgcaagatcagaaatccctcacttcttctgtgaccttatgcccctcctgaaactctcctgctcagatacacacatcaatgagctggtgatctttgcttttggcattgtcatgggcctcagcccactgtcctgcatccttgtctcctacatctgcattttcagggcagttttcaggatcccttctgctcagggcaagtggaaagccttctctacttgtggctcacacctcactgtggtgtcactgttctacgggaccatctttactggatatttactgccagcatcccccagctcctcccagaaagacaaggcagctgcgttaatgtttggggtggttatccctacattaaacccctttatctacagcctaaggaacaaggacatgaaggcagccctgaggaagcttggcagcaaagcagtctcattccagtcctagtgcagagcaggagctgtgtggccac

SEQ ID NO: 1275 - DNA, 967 bp, Mus musculus
  MOR124-1
atgggcccgggaaccctcaatgattcaggaaccacagagttcctgctgctgggactgtgggccccaccttccctgcgccccctgctgtgggcctcacttcttctagcctacctcaccactgtgctgggtaatggtgccctagtgggtctgatagccttggacagacgactgcatcggcccatgtatcgcctgctgacccacctggccctgctggacacagcctatgtgagtaccacgctaccgcaggcgctggcacacatgaccatgcgcagtgcccgcctctccctggtacgttgtggcacgcagctgtacgtgggcatctccctgggcagctgcgaggccatcctcttggcagcgatggccctggaccgctgcctggctgtgtgcagaccgctgcattatgcgaccctggtgaccgccccccgctgcgcagcgctggctggagcatcctggacactgggctttgcactctctgtacccaatgcggtggctgcactacgcctgcccttctgtcctgggagggcagcggtggaccacttcttctgtgagctacctgcggtgctgaggacagcgtgtgcggacaccacagccaactacaggctggtctatggcctgggcgtgcccatcctcctggtacctttggtcctcatcctagcctcttacacctggattctggctgctgtgcgcaagttgccttctgctggaagtcgccacaaagctttgtccacctgcagctcacatttggctgtggtggggctcttctatggcacggtgagtgccatgtacctgcggcccaaagcctctagtgatcttcctgctagacaccataaactggtggcagttttctacctggtggtcacacctgtcctcaatccactcatactacagccttcgaaaccgtgaggtccacatggcagctcgctatgccctggcccggctgcgggggacgcgcattgtgttgcactaa

SEQ ID NO: 1276 - DNA, 945 bp, Mus musculus
  MOR267-16
atggagtgtgtaaatgacactgtggtcagagagtttgtcttccttggcttctcgtctctggctgagctgcagctgctactctttgccgtcttcctgtccctctatttgttcactctgagcaccaacgctgtgattgtttccaccattgtgctagacagagcccttcatacgcccatgtacttcttcctttctgtcctgtcctgttctgagacctgctacaccttcgtcattgtgcccaagatgctggttgacttgctggcgcggaagaagagcatctctttcctcggctgcgccatccaaatgttcaccttcctcttcctcggctgttctcattccttcctgctggcagccatgggttatgatcgatacgtggccatttgccaccctctgcgctacacggtgctcatggggcacagggtatgcgtggggctagtagctgctgcgtgtgtctgtggcttcactgtggcacaggtaatcacatcccaggtgtttcgtctacccttccgctcttccaatcaactccaccactttttctgtgacatctcccctgttctccagttggcatctcaccaccctcactccactcagatcaccatcttcctgctttgcgcgctggtcttggttatccctctcttgttgatcctggtatcatatattcacatcatttctgccatcctccaattcccttccacgctgggcaggtacaaagcgttttccacctgtgcctctcacctcattgttgtcatagtgcactatggatgtgcctcttttatctacctaaggcccaagtccagctactcttccagccaggatgcgctgatatcagtatcctacactatcctaactccgttattcaatccagtcatctacagcttaagaaacaaagacttcaaatcagctcttcatagggtaataggaagaacagttaccctaagacaacattga

SEQ ID NO: 1277 - DNA, 693 bp, Mus musculus
  MOR182-11P
tctgtgacaccaaagatgcttatgaaatttttaaataagaatgacatgatatctgtgggtgagtgttttgcccaatattattttttttgcttcagtgcaactactgaaattttcctcctggtagcaatggcttatgaccgctatgtagccatatgcaaccctctgctctatctagtggtgatgtccaagagactctgcactgtgttcatcagtttatcatatataattggtgttctaaatcctatagttcatgtgggattattattcagattaacattctgtaaatctaatgttattgatcatttctactgtgaaatcttgccactctacacaatttcttgcacagatgcatctctgaatgcattggtaatttttatttttgcttcttccatacaaatcagtacctctgtgactattatagtctcttatgcccgtgtcctattttcggtcctgaacatgaagtctgagaagggcagaagaaaagctttctttacctgcagtgcccacctgctctctgtctctttgttctatggtaccctcctcttcatgtatgtgagtcatgggtctgcaccaggtgaaaaccaggataaaatgtattctctgttctacacagttgtgattcctctgctaaacccctttatttacagcttaagaaacaaggaggttttgtgtgctttgagaaaagtcgttaaa

SEQ ID NO: 1278 - DNA, 845 bp, Mus musculus
  variation (460)...(621): Any nucleotide A, C, G or T
  MOR231-19P
atgggccagagcaacaatgtcacagaatttgtcctgctgggcttcactcaggatcctgctgggcaaaaagctttatttgttatgttttcactgatgtacattgcaacaatggtgggcaacctgctcatcgtagggacagtgattgccagcccctccttgggctccccaatgtacttcttccttgcctctctgtcactcatggatgctgtttattccactgccatctcacccaagttgattgtagacttgctccgtgagaaaaagaccatctccttcagagcttgcataagccagctctttatagagcatttgtttggtggggttgatattgtcattctcgtggcaatggcctatgatcgctatgtggccatctgtaagccactgcattatttgattatcatgaatcgacgggtatgtattcttttcttggtgatggcctgggtgggaggttttgtacatnnnnnnnnnnnnnnnnnnnnnnnnnnnnnnnnnnnnnnnnnnnnnnnnnnnnnnnnnnnnnnnnnnnnnnnnnnnnnnnnnnnnnnnnnnnnnnnnnnnnnnnnnnnnnnnnnnnnnnnnnnnnnnnnnnnnnnnnnnnnnnnnnnnnnnnnnnnnnnnnnntttttctcttttttgttccctgtattttcatgtatgttagacctgtttctagttttcctattgataaatccatcactgtaatttataccattgtcactcccatgctgaatcctttaatatatactttgagaaattcagagatgaaaaattctatggaaaagctcctgcagaaaatgttaagtccaaatagaataaagctttcttcttgctgctcatatgactaa

SEQ ID NO: 1279 - DNA, 793 bp, Mus musculus
  variation (323)...(379): Any nucleotide A, C, G or T
  MOR15-2P
atgcttcatgtcaacatcaccaacaccatcttctccaccttcctggttacaggcattccagggctggaggcagtgtacatctggatagccataccattctgtgccatgtttctcatcactatggtgggcaacatgaccatcataattgttatctggcatgagcagactcttcatgttcctatgtatctattcctggccatgttagcctcctctgatctgggtctctctctgtttaccttccccacactgttgagaatcttcctgctgaatgatagagagttgaccaccactgcttgtttcacgcagatgttcttcattcacannnnnnnnnnnnnnnnnnnnnnnnnnnnnnnnnnnnnnnnnnnnnnnnnnnnnnnnnatgaaggccacaagtggtgccagatccaggattccttggatttggaattagggatggttgtcagccaagccatgtaggtactgtgaacagaacttgggtcttctacaaaagcaatacataatcttaactgctgaaccatctttacaacaggcactcttgtaagtttgtgtcatgaacaggatattgaatttctcttttgttttctagagaataaatccttcatcaattctcatatcagtttctcattatttaaatacaactgcctatttatctaatagatatttagaatattaaatgtaacaatagccttgtcttcattgtgctgtctttgttctttaaaccaagtaagttgtacaatctcatgcaactttgattgaagtagtaatgtaagaagaaggtaaggatcttcccaat

SEQ ID NO: 1280 - DNA, 292 bp, Mus musculus
  MOR256-52P
atggagaaatataatctcacaatggtgactgaattcatcctggtgggcatcacttaccaccctgagtttcaggtaccattgtttggactgttcctcatcatttatctgacctcactgtttggcaacttgggcatgatcatccttaccatggtggattccgggctgcaaacacccatgtacttctttctcagacaccttgctactactgatcttggttattcaacagctgtgggaccaaaaatgttgagaaattttacttgtagatcaaaatacaatatcatttaatgcctgt

SEQ ID NO: 1281 - DNA, 489 bp, Mus musculus
  MOR202-38
ttacaatcttctgtccatgttgctctggcattttgtctttccttctgtcattccaacgtgattaatcactttttctgtgacattcccccactgctggacatttcttgttctgacacccacacaaatgagattacactgcttgtcttggctacattggatgttgttttcactctcttagttatcttaaacacttacctgcttattttcattgctatcctgaggatgcgttcagctgaagcacagaggaaggcattctctacctgtgcatctcatctcatcactgtgtctatcttctttggttcccttatattcatgtacttacagcccagtttcaatcattccatggacacagacaaaattgcatctgtgttttatacaatggtcattcctatgctgaaccctgtggtctacagcctgaggaacaaagaggtaaaaaatgcatttaagaaagttgttgaaaaattaatgtcttcatttcatttagttgat

SEQ ID NO: 1282 - DNA, 376 bp, Mus musculus
  MOR203-8P
agcttgctctgctttacaaaaagcttcctgggagctctggtcctgatgcagctctgagtctctccaccccagaggtgctgtcctgcaattccaaaagacattactaaccactgttgacaagaatagatggatgtcttctgctgcaggaaggaaaaaggccttctccacatgtgcttcccacctgactgcagtcaccattttctatgggactctcgcctacatgtatctacaccctcataccaatgactctcaagagcaagaaaaggcagcttctgtattttatggcataattattcccatgttgaaccccttgatctatagtctgagaaaccaagatgtaatagaagccttcaaaaagatagcgaagaaatgctta

SEQ ID NO: 1283 - DNA, 793 bp, Mus musculus
  MOR220-4P
agattgcctttggtagggtggccatttttactatgttaattctgccaacctatgagcattggagatgtctccattttctaagttcttttcaatgaaagaaatgaacatacccatgtatttcctcagtattctgcccactttagacatggactatgttttctgtcactgtgcccaatacctgtatcaacactctgagtgaccacaggaacatttctgtaggtggattgcagcacagatctttttctctatatttgcacatgtgtagagattctatttttttaccaccatggcccaggaccactatgtggccatctgcaagccactcctctactctgtgatcatgaaccaccggttatgtgttcagatgacactggcttccctacttagctctcttgtccttgcaattgttcacactttcaaaatattccagctgtccttctgttactctagtatggtccctcagttcttttgtgatatcccctttgctgaggtttcttgctctgatacctttaacaacaaactcctaattcttctgtctgccactgtggtcagtggtagctactttgtctttcttgtcatatcatatgctcatagattatcaaatgtgttgaagtttcctgtcaaaagagagatagggaaggccttttcaacctttgtccttcactttattgtggtgtctgtctttctttgttctggggcttatgtgtacctaagtacattaggtaccatagtaacattagaagtaaaggagatgattctttctgtattttataccattgctacaccattcttt

SEQ ID NO: 1284 - DNA, 589 bp, Mus musculus
  MOR136-18P
ttttttccaaatatgtgggttgctgtttcgtactattggcaatgtcctttgtcttataggtatgtgcccatctgctatcctctgcgctatatgtccatcaagagcctgaacctctatgtccttctagtagttatatcctgggcctttccctctgccaatgcccttgtgcatatccttctcttagctcgactatctcactttagacacaataccatacccctacatctttaaacgctctgccttgctgaatctgtccagctcagaaacaatcatcaatgaactcgtcatccttcctttaggtacagtgatcatccttgtcacttatggcctcattagagtcacaatcctgagaacgctccccatcaagggaatctgcaaagccttgtccacatgcgactctcacctctgtgagtttccttgtactatggagccattattgggcttatatctagtcccctcatctaataacattaatgacaaggatgttaatgtatctgcgatatataacgtggtcatacccatgatcaatacattaatttatagtctgaggaattgggatatcatcttgagtgaggtaacccagacctaa

SEQ ID NO: 1285 - DNA, 568 bp, Mus musculus
  MOR255-7P
tcgaacccagcctcaacactcatttacagcacccaaatgaaccacatcatccagaggatcttggtggcctcatcgtgggtttgttccttcagcagtgtacttactcatactgtggccatatccacacttcacttctgtggtctcaatgtggtcaataacttctactgtgacctgcctcagctcttccaactgtcctgctccactacccagctaaatgagctgctgctctttgcagtaggtttcctaatgacagaaacctccatggcactcatttttaccttttacatctatggggcagttgcaattctgcaaatccgctctgctgaaggcaggtagaaagccttctccacatacagctctcacctcactgtggttgccatattctatggcacaggtatctttgcctacatgagtctcaggtccatcaaactttctgataatgataaagctattgggattttcaacactgatgatcaaccccatgctaaacccactcatctacagtctcagaaaccctgatgtgcaggctgccctctggaaggtactcacagggaaacagctatcacat

SEQ ID NO: 1286 - DNA, 996 bp, Mus musculus
  MOR264-21P
tttttcaaatttaccacatctacagatgaagacctattcaaacaagaaaaattgaatgcctccacactgatggaatttactcttcttgggttttctaatgttcctcatttgcagtgggtgctgtttatggtatttttgtttatgtatatgacaattctgttgtgcaacagcattataatagtgttagcaaaaactgaccctgctctccagactcctatgtattttttccttagcaacttttcttttttggaaatctgttatgtaacagctactattccaagaatgcttatggatctatatacactaaaaggaaacatttctgtgtttgcctgtgcaacacaaatgtattttgtccttatgttgggagccacagagtgcctcttgctagcagctatggcctatgatcgttatgtggctatctgccaccctctccaatattctttacttatgaagaataaagtgtgtttacagctggtagctgcctcctggatcagtgggattccagtagaaattgggcagacctaccagatattctcccttcacttttgtgcttctaacagaatagatcactttttctgtgacatccccccacttctcaagcttgcttgtggtgacacctttatgaatacagttgcagtgtatgttgttgcagtggtgtttgttatggttccatttctgctaatcattgtctcctacatcaagattatctgcaacattatgaaactgtcttcagccaaagggatggccaaggctttttccacctgctcgtctcacctgatagttgtaatcttgttctatggaacagcaagcattacttacttacagcccaaacaaagtcagtcagaaggaatgggggaagatgctgtctcttttctacaccattttgatcccagctttgaatcctattatatacagtctgagggaacaaagatatcatgatgggcactgagaaaattacacagtaagttactgatatggtgggaaaacgtaaaatag

SEQ ID NO: 1287 - DNA, 893 bp, Mus musculus
  MOR231-20P
atgggccagagcaacaatgtcacagaatttgtcctgctgggcttcactcaggatcctgctgggcaaaaagctttatttgttatgttttcactgatgtacattgcaacaatggtgggcaacctgctcatcgtaggaacagtgattgccagcccctccttgggctccccaatgtacttcttccttgcctctctgtcactcatggatgctgtttattccactgccatctcacccaagttgattgtagacttgctccgtgagaaaaagaccatctccttcagagcttgcataagccagctctttatagagcatttgtttggtggggttgatattgtcattctcgtggcaatggcctatgatcgctatgtggccatctgtaagccactgcattatttgattatcatgaatcgacgggtatgtattcttttcttggtgatggcctgggtgggaggttttgtacatgctttgtttcaagttctcgctgtatataatcttcctttctgcggtcccaatatcattgaccactttggctgtgacatatacccactattactactttgcatgtactgatacctatttcattggtcttttctgtcattggcaataatggagcaatgtgtatagtcatcttcattctcctcctactctcctatggaataatccttagatctctcaagaatcacagtcaggaagggaggcgcaaagctctgtccacctgtggttcccatatcactgtggtttttctcttttttgttccatgtattttcatgtatgttagacctgtttctagttttcctattgataaattcatcactgtaatttataccattgttactcccatgttgaatcctttaatatatactttgagaaattcagaaatgaaaaattctaggaaa

SEQ ID NO: 1288 - DNA, 962 bp, Mus musculus
  MOR286-3P
tcccagacagcagacccgaagaacagcagcagcactgtgactgagttcatcctcgtgggctttgagcagagctccccttccacacgggcattgctcttcaccctcttcctggctctctacagcctcgccatggccatgaatggcctcatcatcttcatcacatggactgaccccaggctcaacagccccatgtacttcttccttggacacctgtctttcctggacgtctgcttcatcaccaccaccatcccgcagatgttggtccatctggtgaccaagaaccacactgtctcctttgtctcttgcatgacccagatgtacttggtctttctagtgggtgtggccgagtgcatcctccttggctttcatggcctatgatcgttatgttgccatctgccacccactgaactatgcccagatcatgagccagaaaggtgtgtgtcaggctggtgtgttcttcctggatctttgggatggtcaatggtatctttcttgagtatatatcattcaggaatcccttctgcaaagacaaccacatagagaacttcttctgtgaggctcccatagtgatcgctctctcctgcggggacctcaagttcaccatgaagttgatctttgtggatgccattgtggtgttgctcagtcccatggtgctcatcatcacctcctatgcccgcatcctggcctccatcctccacagggcctcctcctcaagccataggaagaccttttctacttgtgcctcccacctgactgtggtcatctttttgtacacttcagccatgttttcttacatgaatccccgcagtacacatgggcctgacaaagacaagtctttctccctcctctataccatcatcatgcccatgtgcaacccggtcatctacagcttccgcaacaaggaaatgaagggggccatggggcgggctcttgggagaggcagcctggcttaggcaggatct

SEQ ID NO: 1289 - DNA, 958 bp, Mus musculus
  MOR245-24P
gaagcaaatgactctgtggtgaaagaatttatttttattggcctctctgattctcagggacttcagatctttctatttgcattctttctcattttctatgtaggaattgtgtttggtaaccttcttattgtcatgacagtaacctatgactcccacctccactctcctatgtatttccttctggccaacctctcattcattgatctgtgtctgtcttctgtcacagcaccaaagatgattgctgattttttcaggaaacacaaagtcatctctgtccatggctgttttgcacagatatttctccttcacttctttggggggagtgagctggtgaccctcatagccatggcctttgacagatatgtagcaatttgtaagcctctacgctacacaataattatgcgtggcaatgtatgtgctggcattgtggctactgcatgggcaactggcttcctacactcagtgagccaattggcctttgccgtcaacttacccttttgtggtcccaataaggttgacagtttttattgtgaccttcctagagtaatcaaacttgcctgtgcagacacatataggttagacatcatggtcattgccaacagtggtgtgcttactgtgtgctcttttgttttgttaatcatctcctacagtatcattctaactaccatccagcgccgcccttctgataggtcatctaaggctctgtctacactgactgctcatatcacagtagttcttttgttttttggaccttgcattttcatttatgcctggccctttcccatcaagtcattagataaattcccttgctgtgttttattctgtggtcactcctctcttgaaccccattatatacacactgaggaacacagagatgaaaactgccatgagacgccctgagacaatggaatttaaacttttgggtgaactcatagatctcctctggccacgagattga

SEQ ID NO: 1290 - DNA, 932 bp, Mus musculus
  MOR256-53P
atgggagcaaccaacgacagcaccttcagccatttcatccttactggcttctctgaccggcctgagctggagagggtcctcttcgccatcctcctgcccgcctacctcctgaccctgctgggcaacagcaccatcatcctggtgtccaggctggacccgcaccttcacacccccatgtacttcttcctcacacacctgtccttcctggacctcagcttcaccagtagctccatcccacagctactctataacctcagcgggccagacaagaccatcagctatgtgggctgtgctctgcagctggtcctgttcctgggcctggggggtgtggagtgcctgctgctggctgtcatggcctatgaccgatttgtggcgatctgcaaacctctgcactacatggtcatcatgagccccaggctctgcgtgggcctggtctcagtggcctggagctgcggtgtggccaactcccttggctatgtctccagcaaccctcagcctaccccgctgcgggcaccacagggtggatcacttcctctgcgagatgccagctctcatcaggatggcctgtgtcaacactggccgcagtggaaggcactgtcttcgtcctggcaataggcatcgtgttgtcgcctctggtgttcatcttggtctcctacggttacattgtaagggctgtgttacaaatccgctccgctgcagggcggcagaaggcattcaacacgtgtggttcgcatctcaccgtggtctcgcttttctatggaaatatcatctacatgtacatgcagccggggaacagctcctcccaggaccagggcaagttcctcaccctcttctacaacattgtcacccctctcctcaaccctctgatctacacgctcaggaacaaggaggtgaagggggcgctcagaaggctgctcctgggtagccgagag

SEQ ID NO: 1291 - DNA, 951 bp, Mus musculus
  MOR265-1
atgtctaactctgagctcatgaagaatggaagcctgtccctctgcactgaattcacattggtggccttttcttctctagcagagctgcagcttgtcctctttgttgtgttcttggttctctacttgtttacagtgggaggaaacctcaccatcatctgtgtgatctggaccacaccttctctacacacgcccatgtacttcttcctggccaacctctccttcctagagatgtgctatatcagcagtgtggtgcctcagatgctggtgcacctgctggtacagctcaagaccataagtgtggcaggctgtgcagctcagatgtatgtattcaccatcttggggctgacagagtgttgccttctggcaactatggcttatgatcgctttgtggctatttgttacccactacattacactctgtggatggacccttctgtctgtctgaagttggctggtgcatcttggatgactgggatcctggtagaatcagcccagaccacctggatcttcactctgcccttttgtggagcaggaacaattcaacactttttctgtgacatcatgcctgtggtaaaattagcttgtgtggatacttcccagaatgaaatggtgatatttattatttctcttatcttcattatgagtccctgtctcttcattctatgctcttatgtccgcattattctgaccatcttgaaaatgccctcagcagcaggcagacacaaagctttctccacctgctcctctcatatcctggttgtttctcttttctatggcactgccttattcacttatctccaacccaagagttcacacaccccagacacagacaaggttactgctctcatgtacactgtggtcacccctgctctgaatcctgttatctatacgttgaggaacaaagaagtgaaagaagcctttcaaaaggtaacacagaaggaaacttcatag

SEQ ID NO: 1292 - DNA, 934 bp, Mus musculus
  MOR150-3
atgggaggtaaaaaccagacagatgtttctcacttctttcttctgggactaacagatgatccaactgtgaagcctgtgatcttttgtatcttcctgttgatgtacatggtcaccatcttgggaaatctgcttattatccttgctgtatgttcttattctcatttgcaaacacccatgtacttttttatttcaaatttatccattaatgatatctgcttatccacaactgtcattccaaatatgttacggactactcaaacacaggatcagagcatcagttatgcaggctgccttactcagctttgctttgtcttgctatttgctggattcgaaagctgtcttcttgcagcaatggcctatgaccgatatgttgctatttgttatccactgagttatacagtcatgatgaattttcattcatgtgctctactaattctcttctctgttctcattagcgttttgaacatgggacttcttggtctcatggtattaagactatctttctgcacaaatctagagatccccttattcttctgtgaactttctcaggtcatgaagcttgcatgctctgacacccttattaatgatattctgatatatcttgcaacatttatatttggtggcatcccaatctctggtattattttctcttatgtccaaattgcttcttctgttttgagaatatcatcagtaaaaggaagatgtaaagccttttccacttgtggttctcacttgtcagtgacttctttgtcctatggttcaggattgtgggtttatataacctcttcagttgctattttacccaagaagacttcagtggcctgcattatgtacactgtagtcccacaaatggttgaacccatttatctttagccttcgaaataaggacatgaaaggaactatgaaaaaattcatcagtaaagtagcttctctt

SEQ ID NO: 1293 - DNA, 934 bp, Mus musculus
  MOR256-54P
atgagcagcttcaacaccaccttaaaaggtggcttcattttgatgggcttctcagactggcctcaactggaacatatcttttttgtcttcatttcaatgttctatatcctaaccatctttggaaacttcaccatcatcacaatctcacgaatggatcagcgactacaaacaccaatgtacttcttccttaacaacctctctttcctggacctctgctacaacaccagcattgtacctcagcttcttgtcaatatttctggaattgacaagaccatgagctatgctgggtgcatgacccagttcttcatagtgctcttactgggtggaactgagtgtatgctccttgtggtgatggctttcgaccgctatgtcgctgtgtgtcatccactacactacaccagcattatgcacccccttctctgccatgcattggccatctcctcctgggtgggaggccttgtgaactctctgactcagacaagcctcatcatgaccatacctctctgtggccatcacctgaaccacttcttctgtgagatgcttgttctcctgaagctggcttgtgaggacacagtgggaacagaggccaacttgtttgtggctggagcgattattttggtctgtcctgtagcactaattctaggcacctatgcacacattgctcatgcagtgttgaagatcaagtcaagatctgggcgcagaaaggctctggggacttggtgggtcccaccttactgggggtttttcttttttatggctcagccatgtacatgtatctccaacctgtccacgtgtattccgggagtgaaggaaagtttgctgccctcttttatactatcattactccaatgatgaaccctgatttataccctaaaaaacaaaaatgtgaaggggggctttgtgcaaggtactagggagagatacaagcacaaca

SEQ ID NO: 1294 - DNA, 948 bp, Mus musculus
  MOR267-17
atggctgtcatgttggggctaaattacacctttgtgtcagagttcatcctcattggcttctctaccttccctcatcttcagctgatgttcttcctgctgttcctgctcatgtacctcttcacactgctaggcaacctgctcatcatgaccaccatctggagtgaacacagtctccacacacccatgtacctcttcctgtgtgccctctccatctctgagattttctacacctttgccatcatcccacgcatgttggctgacctgctcaccacacttcactccatcgcctttctggcctgtgccagccagatgttcttctccttcacatttggcttcacccattcctttctactcaccgtcatgggctatgaccgctacgtggccatctgtcacccactgagatacaatgtgctcatgagcccccgtggctgtgcctgcctggtagcctggtcctgggttggtggatcattcatggggacagtggtgacgacagccattttcaacctcacattctgtggacccaatgagatccaccattttacttgtcatgttccacctctattgaagttggcatgtggagagaatgtactggaggtggcaaagggtgtagaaatagtgtgcatcacagccctcctgggctgctttctcctcatcctcctctcatatgccttcattgtggttaccatcttgaagataccatcagctgagggtcggcacaaggctttctccacatgtgcatcccacctcacagtggtggttgtacattatggctttgcttctgtcatttacctcaagcctaagggccccaagtctctggaaggagatactctgatgggcatcacctacacagtcctcacccccttccttagtcccatcatcttcagtctcaggaacaaggagctaaagaatgccatggaagaaagctttcctcaacaaattatttccaca

SEQ ID NO: 1295 - DNA, 970 bp, Mus musculus
  MOR15-3
atgcttcatgtcaacatcaccaacaccatcttctccaccttcctggttacaggcattccagggctggaggcagtgtacatctggatagccataccattctgtgccatgtttctcatcactatggtgggcaacatgaccatcataattgttatctggcatgagcagactcttcatgttcctatgtatctattcctggccatgttagcctcctctgatctgggtctctctctgtttaccttccccacactgttgagaatcttcctgctgaatgatagagagttgaccaccactgcttgtttcacgcagatgttcttcattcacactttccaagaccttgaatcagctattattctggcaatggccttcgatcggtatgtggccatttctcacccacttcactatcactccattctcacagacactgtgattgccaagataggcttggctattgttgtacgaaccttaactgtgcaggtgcctctccctatcctcttgaagagattgtacttctgtcattccaatgtactatctcattcctactgtttgcatcctgacatcataaagctctcctgctccagtactactgtcaacagtatctttggactttttgtagtgctctccaccatggggcttgacttcctccttatcctactctcatatgcattgattctgaaaacagtactgaatatggcttcccacagtggccgcctcaaggctctcaacacctgcatctctcatctgtgtgctgtggtcctcttcttcacacccatgatctgcctatccatgctgcatcgttttggtccaaggcttccctcacatgtctatgtgaccctggccaacatgcactttctaattcctccagtgatgaaccccatcgtctatgtggtgaaaaccaaggcagatccgtgacaaaattcagaaactcttcattagaaaagcaacaaagaaagctcaggctgcatctataaca

SEQ ID NO: 1296 - DNA, 902 bp, Mus musculus
  MOR184-11P
atggagaagacaaatcactctttgaccacacagttcatcctggtgggattctcagatcacccagacttgaagacacctctgttcctgctgttctctgtcatctatctggtcaccatggtggggaatcttgggctggtggccgtgatctacttggagcctcgtctccacacacccatgtacatctttctgggcaacctggctctgatggactcctgctgctcctgtgccatcactcccaagattctagagaacttcttttctgtagacagaaggatttctctctatgaatgcatggcacaattctattttctgtgtcttgctgaaactgcagactgctttcttctggcagcaatggcctatgaccgctatgtggccatatgcaaccctctgcagtaccacagcatgatgtccaagaaactctccattcagatgagtataggcacattcataaccagtaacctgcattccttgattcatgtagggtgtctcttaaggttaactttctgtaaatctaacagaatttgatcatttcttctgtgatattcttcccctatatagactctcctgtacagacccatttatcaatgaattaatgatatatattttttctatgccaattcaagtcttcaccattaccactgtcttggtctcttacttctgcattcttctcactattttcaagatgaaatccaaaggatgggagaggaaaagcattttctacctgtgcatcccactttttttctgtgtcaatattctatgcctgtcttctcatgtatattagaccatttgatgacagtaataaagacataccagtggccatattttatacaataataattcctttgttaaacccttttatttacagcctgagaaatactgaggtagtaaatgcgttaagaaag

SEQ ID NO: 1297 - protein, 307 aa, Mus musculus
MWSNISAAPFLLTGFPGLEAAHHWISIPFFAIYISVLLGNGTLLYLIKDDHNLHEPMYYFLAMLAGTDLTVTLTTMPTVMAVLWVNHREIRHGACFLQAYIIHSLSIVESGVLLAMSYDRFVAICTPLHYNSILTNSRVIAIGLGVVLRGFLSLVPPILPLFWFSYCRSHVLSHAFCLHQDVMKLACADITFNRIYPVVLVALTFFLDALIIVFSYVLILKTVMGIASGEERAKALNTCVSHISCVLVFYITVIGLTFIHRFGKNAPHVVHITMSYVYFLFPPFMNPIIYSIKTKQIQRSVLHLLSV

SEQ ID NO: 1298 - protein, 315 aa, Mus musculus
MPSMWLNISSSPFLLTGFPGLEKAHHLISLPLLMAYISILLGNGTLLFLIKDDHNLHEPMYYFLGMLAATDLGVTLTTMPTVLSVLWLNHREIGHGACFSQAYFIHTLSIVESGVLLAMAYDRFIAIRNPLRYTTILTDTKVIKIGIGLVMRAGLSIMPIIIRLHWFPYCRSHVLSHAFCLHQDVIKLACADITFNRLYPVVVVFAMVLLDFLIIFFSYVLILKTVMGIASTDERAKALNTCVSHICCILVFYVTVVGLTFIHRFGKNVPHVVHITMSYIYFLFPPFMNPVIYSIKTKQIQSGLLRLFSLPCSKT

SEQ ID NO: 1299 - protein, 311 aa, Mus musculus
MWPNSSDAPFLLTGFLGLEMIHHWISIPFFVIYFSIIVGNGTLLFIIWSDHSLHEPMYYFLAVLASMDLGMTLTTMPTVLGVLVLNQREIVHGACFIQSYFIHSLAIVESGVLLAMSYDRFVAICTPLHYNSILTNSRVMKMALGALLRGFVSIVPPIMPLFWFPYCHSHVLSHAFCLHQDVMKLACADITFNLIYPVVLVALTFFLDALIIIFSYVLILKKVMGIASGEERKKSLNTCVSHISCVLVFYITVIGLTFIHRFGKNAPHVVHITMSYVYFLFPPFMNPIIYSIKTKQIQRSILRLLSKHSRT

SEQ ID NO: 1300 - protein, 317 aa, Mus musculus
MPVIWLNTSTYPFLLTGFPGLEKSHHLISLPLLMAYIFILLGNGTLLFLIKDDHNLHEPMYYFLGMLAATDLGVTLTTMPTVLGVLWLNHREIGHGACFSQAYFIHSFSIVESGVLLAMAYDRFIAIRNPLRYTTILTDIKVIKIGIGVVMRAGLSIMPIIIRLHWFPYCRSHVLSHAFCLHQDVIKLACADITFNRLYPIVVVFCMGLLDFLIICFSYILILKTVMGIASTDERAKALNTCVSHICCILVFYVTVVGLTFIHRFGKNIPHIVHITMSYICFLFPPFMNPVIFSIKTKQIQSGLLRLFSLPYSRIRL

SEQ ID NO: 1301 - protein, 314 aa, Mus musculus
MGGEAHNSSGLPPFILTGLPGMETSQHWLFLLLGVLYSVSIVGNALILFIIKEEESLHQPMYYFLSLLSGNDLGVSFSTLPTVLGVFCFHLREISFNSCMSQMFFIHLFSFMESGILLAMSFDRYVAICNPLRYSTVLTDARVMWMGVCVFLRSFCMIFPLPFLLKRLPFCKANVLSHAYCLHPDLIRLPCGDTSINNIFGLSIVISTFGLDSALIFLSYVLILRSVLAIASREERMKTLNTCVSHLCAVLIFYVPKVGVSMFARYGRHAPHYVHTLLSLIYLFVPPMLNPVIYSIKTKEIRRRFCKILLGNKF

SEQ ID NO: 1302 - protein, 321 aa, Mus musculus
MLRPSSMSEVTNTTHGPFYFILTGIPGFEDIHLWISIPFFCLYTISIMGNTTILTVIRTEPSLHEPMYLFLSMLALTDLGLTLTTLPTVMQVLWFNIREISFEACFAQVFFLHGFSFMESSVLLAMSFDRYVAICRPLHYASILTSEVIARIGLAIICRCVLAVLPSLFLLKRLPFCHSHLLSHSYCLHQDMIHLVCADIRVNRWYGFALVLLIIVLDPLLIVLSYALILKSVLNTATWTERLRALNNCLSHMLAVLVLYVPMVGVSMTHRFAKHASPLVHVLMANIYLLAPPVMNPIIYSVKTKQIRQGITRLLLQRKVH

SEQ ID NO: 1303 - protein, 317 aa, Mus musculus
MKVSIPPRANFSYAIFLLTGFPGLEWAHHWISLPIFMGYFVAIMGNATILHLVRTDPSLHQPMYYFLAILAVTDLGLCMSTLPSVLGVLWFDARMVGLVPCVLQQHFLHSFSFMESAVLFAMALDRLIAIRFPLRYASVLTGPRVALIGTVLGMRSAAITAAPSLHLLTFDYCHPGALSHAYCLHQDMIRLACSDTRFNRLYGLCIIMLAMGSDVLFILLSYAVILRTVLAIASAGERLKALNTCVSHILAVLCFYVPVLGLSIVHRFGQHTSPLVHILMGTVSVLFPPVMNPVIYSIKTQQIRRAIVKVISLGKIQ

SEQ ID NO: 1304 - protein, 321 aa, Mus musculus
MLHPSSMSEVTNTTHDPFYFILTGIPGFEDIHLWISIPLFCLYTISIMGNTTILTVIRTEPSLHQPMYLFLSMLALTDLGLTLTTLPTVMQLLWFNIREISFEACFAQFFFLHGFSFMESSVLLAMSFDRYVAICRPLHYASILTSEVIARIGLAIICRCVLAVLPSLFLLKRLPFCHSHLISHSYCLHQDMIHLVCADIRVNSWYGFALVLLIIVLDPLLIVLSYALILKSVLNTATWTERLRALNNCLSHMLAVLVLYVPMVGVSMTHRFAKHASPLVHVLMANIYLLAPPVMNPIIYSVKTKQIRQGITRLLLQRKVH

SEQ ID NO: 1305 - protein, 326 aa, Mus musculus
MKVASSFHNDTNPQDVWYVLIGIPGLEDLHSWIAIPICSMYIVAVIGNVLLIFLIVTERSLHEPMYFFLSMLALADLLLSTATAPKMLAIFWFHSRGISFGSCVSQMFFIHFIFVAESAILLAMAFDRYVAICYPLRYTTILTSSVIGKIGTAAVVRSFLICFPFIFLVYRLLYCGKHIIPHSYCEHMGIARLACDNITVNIIYGLTMALLSTGLDILLIIISYTMILRTVFQIPSWAARYKALNTCGSHICVILLFYTPAFFSFFAHRFGGKTVPRHIHILVANLYVVVPPMLNPIIYGVKTKQIQDRVVFLFSSVSTCQHDSRC

SEQ ID NO: 1306 - protein, 315 aa, Mus musculus
MLGTNFTIIHPTVFILLGIPGLEQYHTWLSIPFCLMYIAAVLGNGALILVVLSERTLHEPMYVFLSMLAGTDILLSTTTVPKTLAIFWFHAGEIPFDACIAQMFFIHVAFVAESGILLAMAFDRYVAICTPLRYSAVLTPMAIGKMTLAIWGRSIGTIFPIIFLLKRLSYCRTNVIPHSYCEHIGVARLACADITVNIWYGFSVPMASVLVDVALIGISYTLILQAVFRLPSQDARHKALNTCGSHIGVILLFFIPSFFTFLTHRFGKNIPHHVHILLANLYVLVPPMLNPIIYGAKTKQIRDSMTRMLSVVWKS

SEQ ID NO: 1307 - protein, 313 aa, Mus musculus
MAILYNSSLQKATFFLTGFQGLEEFHGWISIPFCSIYLIVILGNLTILHVIRTDATLHEPMYYFLAMLALTDLGLCLSTLPTVLGIFWFDAREIGIPACFTQLFFIHTLSLVESSVLLSMSFDRYVAICNPLRYSTILTPRRIVKMGLSSVLRSALLILPLPFLLKRFHYCRSHVLAHAYCLHLEIMKLACSSIIVNHIYGLFVVACTVGVDSLLIFLSYTLILHAVLGKASRQERLRALNTCISHICAVLLFYIPMIGLSLVHRFGEHLPRIVHLLMSYVYLLVPPLMNPIVYSIKTKQIRQRIIKKFEFIK

SEQ ID NO: 1308 - protein, 318 aa, Mus musculus
MLVKSSIMSVLNSSEIEITTFFLIGIPGLEYAHAWISIPICLMYLVAILGNCTILFVIRTEPSLHAPMYYFLSMLAISDLGLSLSSLPTMLRIFVFNATGISPNACFAQEFFIHGFTDMESSVLLIMSFDRFLAIRNPLRYSSILTSARVAKMGLVFLIKSMLLVLPFPFTLKRLAYCQKSLLSHSYCLHQDVMKLACSDNTVNFFYGFFVALCMMSDSMFIAVSYIFILKTVMGIGSHKERLKALNTCVSHICAVLIFYVPIIALASMHRFGKHKSPMAMILIADIFLLVPPLMNPIVYCVKTRQIREKVLGKLGLK

SEQ ID NO: 1309 - protein, 314 aa, Mus musculus
MPTFQNTTASSIIFLLTGVPGLEAFHTWISIPFCFLYATALSGNSLILFVIITQPSLHEPMYYFLSMLSTTDLGLSISTLATMLGIFWFNAREISFNACLSLMFFIKLFTVMESSVLLAMAYDRYVAISNPLRYATILTDSRIAQIGVTIVIRGTVMLTPMVALLKRLTFCSSRVLHHSYCFHPDVMKLSCTDTRINNAVGLTAMISTVGVDSVLILLSYILIIRTVLSIASPEERKKAFSTCISHIGAVAIFYIPLISLSFVHRFGKRAPPYVHTMIANTYLLIPPVMNPIIYSVKTKQIRKAVIKVFQSKEI

SEQ ID NO: 1310 - protein, 318 aa, Mus musculus
MIPSGPFINISFFQPQSFLMIGIPGLEFAHGWISIPFSFMYTVALTGNCLILLAVRRTHSLHQPMYYFLSMLALSDVGLSLSTLPSTLAVLWFDYRSIDFNACLVQMFFLHSFSVVESSVLLAMSFDRFVAISNPLRYASVLTNNVIIRIGVAIVARATLSLFPVPFLLKRLNYCPGKILLSHSFCFHADVMKLACADITVNILYGLYVVLSTVGVDSLLIVMSYSLILHTVMGLASPRERVRTLNTCVSHILAVLVFYIPVIGVSMIHRFGKHLPHIVHALVAYVYLVVPPVLNPIIYSVKSKPIRGAMFKVLRGKD

SEQ ID NO: 1311 - protein, 317 aa, Mus musculus
MHTGMSIFNLSVTEVSTFHLVGFPGMESAHIWIFIPICLLYTVAILGNCTILFFIKSEPSLHEPMYYFLSMLALSDLGLSISSLPTMLKVFLFNSPDISPNECFAQEFFIHEFSAMESSVLLIMSFDRYIAICNPLRYTSILTSARVLQIGLAFSLKNVLLILPFPVTLVRLRYCKKNLLSHSYCLHQDVMKLACSDNKFNVIYGLFVALTGILDITFIFMSYALILRAVLGIASQRERLKVLSTCVSHICAVLIFYVPVISLAVIYRLASRSSPISKILMADIFLLVPPVMNPIIYCVKSQQIRNVILEKLCQKQS

SEQ ID NO: 1312 - protein, 312 aa, Mus musculus
MILNTSEVEISSFLLIGIPGFEHMHIWISIPICLMYLTAILGNCTILCVIRTEPSLHEPMYYFLSMLAFSDLGLSFSSIPTMLRIFLFNAMGISTDACIAQEFFIHGFTDMESSVLLIMSFDRFVAIRHPLRYSAILTSSRVVQIGLAFSVKSILLVLPLPFTLKRLRYCNKRLLSHSYCLHQDVMKLACSDNRVNFYYGLFVALCMMSDSVFIAVSYVFILKTVLGIASHGERLKALNTCVSHICAVLIFYVPIITLATMHRFAKHKSPLAMILIADAFLLVPPLMNPIVYCVKTRQIRVKVLEKLGLHSK

SEQ ID NO: 1313 - protein, 312 aa, Mus musculus
MTPGPLGNGSMSSTFLLSGIPGLEHMHIWISLPLCLMYLVSILGNCTILFIIKTEPSLHEPMYLFLSMLALTDLGLSLCTLPTVLGIFWVGARDISHDACFTQLFFIHCLSFLESSVLLSMAFDRFVAICRPLHYASILTHTVIVRIGLASLGRSVALIFPLPFMLKRFPYCGSLVLSHSYCLHQEVMKLACADIKANSIYGMFVIVSTVGVDSLLILFSYALILRTVLSIASRAERLKALNTCVSHISAVLLFYTPMIGLSVIHRFGKQAPHLVQVVMGFVYLLFPPVMNPIVYSVKTKQIRDRVAHAFCN

SEQ ID NO: 1314 - protein, 311 aa, Mus musculus
MSNVTLVTTFFLSGIPHPPALDTMLFVAFLVIYILTVLGNFLILMVIRVDSHLHTPMYYFLTNLSFIDMWFSTVTVPKMLMTLVSPRGGAISFHSCVAQLYCFHFLGSTECFLYTVMSYDRYLAISYPLRYSSMMSGRVCALLAAGTWITGSLHSAVQTTLTFRLPYCGPNQIQHYFCDAPPILKLACADTSANEMVIFVNIGVVASGCFLLISLSYVSIVCSILRIRTSEGRHRAFQTCASHCIVVLCFFVPCVFIYLRPGSRDAVDGVVAVFYTVLTPLLNPVVYTLRNKEVKKALVKLKDKVAYSQSQ

SEQ ID NO: 1315 - protein, 310 aa, Mus musculus
MSPGNHSEASLFVLEGLTDQPGLQIPLFSLFLLIYLVSMAGNLGLVFLIRISSQLHTPMYHFLSNLSFIDLCYSSVIIPKMLVNFVSEKNFTAFPECMVQLFLFSFFGIDDSYMLTAMAYDRYVAICNPLLYNVTMSHRVCMLLSTAVYAMGAFGATVHTSYISSRSFCGTNVIHHYFCDILPLINIACSRDYTKEFWVMILVGFNVFASVFSIFISYAFILASILRIRSADGRSKAFSTCSSHLAAVGVFYGSIIFMYFKPSTGNTTQEKVASVFYTTVIPMLNPLIYSLRNKDVKEAIKKALNSGLFS

SEQ ID NO: 1316 - protein, 310 aa, Mus musculus
MLNGSVVTTFFLSGLPHPPVLDSMLFGIFLVIYILTVLGNLLILMVIRVDSHLHTPMYYFLTNLSFIDMWFSTVTVPKMLMTLVSTGGGAISFHSCVAQLYCFHFLGSTECFLYTVMSYDRYLAISYPLRYSSMMSGRVCALLAAGTWITGSLHSAVQTTLIFHLPYCGPNEIQHYFCDGPPILKLACADTSAIEMVIFVNIGVVASGCFFLISLSYVSIVCSILRIRTSEGRHRAFQTCASHCIVVLCFFVPCVFIYLRPGSRDAVDGVVTVFYTVLTPLLNPVVYTLRNKEVKKALFKLKDKVAFSQR

SEQ ID NO: 1317 - protein, 311 aa, Mus musculus
MSNTSIVTTFFLSGLPHPPVLDSMLFGIFLVIYILTVLGNLLILTVIRVDSHLHTPMYYFLTNLSFIDMWFSTVTVPKMLMTLVSTGGGAISFHSCVAQLYCFHFLGSTECFLYTVMSYDRYLAISYPLRYSSMMGGRMCALLAAGTWLTGSLHSAVQTTLTFHLPYCGPNQIQHYFCDAPPILKLACADTSANEMVIFVNIGVVASGCFFLISLSYVSIVCSILRIRTSEGRHRAFQTCASHCIVVLCFFGPGLFIYLRPGSRDAVDGIVAVFYTVLTPLLNPVVYTLRNKEVKKALLKIKYGSVLPQDK

SEQ ID NO: 1318 - protein, 316 aa, Mus musculus
MFCNTSTPGHSTFLLTGFPGLEASHHWVSIPINLICVVSILGNSVILFLIRTDPALHEPMFIFLSMLAASDLGLCASTFPTMVRLFWLGTRELPFDFCAAQMFFIHAFTYVESGVLLAMAFDRFIAIRNPLHYATILPHSAVAKVGAAVLVRAILLNLPGPILLRRLIFPQISTLSHCYCLHCDLVGLACSDTRINSLVGLVSILLSLGLDSSLIMLSYALILRTVLGIASPGERLKALNTCVSHLCIVLIFYLPKLGLSVLHRVEKHSYPALAVLMANLHFLVPPFMNPVVYCIKSKQIRQGFLRRFQQKRVDIS

SEQ ID NO: 1319 - protein, 315 aa, Mus musculus
MNSNASQTNHHSFILTGIPGMPDKNPWMAFPLGFLYTLTLLGNGTILAVVKVEQSLHEPMYYFLCILALTDVSLSMSTLPSMLSIFWFNAPEIPFDACITQMFFIHGFGVVESGVLVSMAFDRFVAIRDPLRYASILTHGLIGKIGLVVLARAVCVVFPVPFLIKRLPFCRSNVLSHSYCLHQDAMRLACASTRVNSLYGLIVVILTLGLDALIILFSYVLILKTVLGIASRAERLKALNTCLSHICAVLLFYIPLIGATMIHRFGKHLSPVVHMFMANIYLLLPPVLNPIVYSVKTKQIRRRIIQVFRGRKNMS

SEQ ID NO: 1320 - protein, 317 aa, Mus musculus
MLVNNITSTHPVAFLLMGIPGLEHLHIWISIPFCSAYTLAVLGNCTLLFIIRVDAALHETMYLFLAMLAAIDLVLSSSTLPKMLSLFWFRDREINFHACLIQMFFLHSFAIMESAMLLAMAFDRYVAICKPLHYTTILTKPLIIKIGLAAVTRAVTLMTPLPFLLRRFHYCRGTVIAHCYCEHMAVVRLACGDTRFNNIYGIAVAMFIVVLDLLFVILSYIFILRAVLQLASQEARYKAFGTCVSHIGAILAFYTPVVISSVMHRVARRAAPHVHILLANFYLLFPPMVNPIIYGVKTKQIRERVLGLFLRKDLKGE

SEQ ID NO: 1321 - protein, 316 aa, Mus musculus
MAPFNYTGTSHSVFILLGIPGLEEQHLWISLPFFISYLVALFGNITLILVIIAERSLHEPMYLFLCMLAAADLILSTTTVPKALAIFWFRAGAISLDGCVTQIFFIHATFIAESGILLAMAFDRYVAICDPLHYSTVLSHVIIVRIGLAVVLRSFCVILPDVFLVKRLPFCRSNVLPHTYCEHMAVARFACADIRVNVWYGLSVLLSTVVLDALLILVSYGLILHTVFRLPSRGARQKALGTCGSHLGVISMFYLPGIFTIITQRFGQHVPLHTHILLANVCMLAPPMLNPIIYGIKTRQIRERVLSSLSSQWKLR

SEQ ID NO: 1322 - protein, 317 aa, Mus musculus
MSDVNTTSNWPTFSFIGIPGLEAAHMWISIPFCLLYLVALGGNVLLLLLVRAEQNLHEPQFYFLAMLALTDLGLSLSTMPSVLAIFWFDVHNVGLDACLTQMFFIHTLSSVESGVLVAMAFDRLVAICAPLTYTRILNHQTVLCLSGAALIRGATLLAPLPFFLRTFPFCGANILSHSYCYYPDMLNLACGDVTFSSVYGLVCVLCTFAVDVIFILVSYMKILGTVMKLGIQDRNWKSLQTCVCHLCTVLVFYLPLISLAVLHRYTQETSPILYTTMSNAYLLMTPLLNPLVYSLKSRQIQAALRKRFGVQRVVAGE

SEQ ID NO: 1323 - protein, 317 aa, Mus musculus
MEITNSSWFQPPTLLLTGIPGLEDVQIWFCIPLCVMYLIALLGNCTILFVIRTTSSLHEPQYIFLSMLAATDVGLSVSTLPTVLNVFLLNHRDIEFHSCLTQMFFIHTFSSMESAILLAMAFDRFVAIRNSLHYTAVLTPTRIIKIGLAAVVRGVMLMIPLPILLKRLPFCKGVILSHCYCYHPDIMKLACGPVRVNIIYGLSLVLCSFGVDSVFIVISYILILKTVLGIASGDGKLKALNTCVSHIFTVFIFYVPLIVLALIHRFGTFASPLLHVTMANLFLFLTPVLNPLVYSLKTKQIRSAVCKIFKVWGNLLK

SEQ ID NO: 1324 - protein, 319 aa, Mus musculus
MATSNSSTIVSSTFYLTGIPGYEEFHHWISIPFCFLYLVGITGNCMILHIVRTDPRLHEPMYYFLAMLSLTDMAMSLPTMMSLFRVLWSISREIQFNICVVQMFLIHTFSFTESSVLLAMALDRYVAICHPLRYATILTPKLIAKIGTAALLRSSILIIPLIARLAFFPFCGSHVLSHSYCLHQDMIRLACADIRFNVIYGLVLITLLWGMDSLGIFVSYVLILHSVLKIASREGRLKALNTCASHICAVLILYVPMIGLSIVHRFAKHSSPLIHIFMAHIYLLVPPVLNPIIYSVKTKQIREGILHLLCSPKISSITM

SEQ ID NO: 1325 - protein, 316 aa, Mus musculus
MPHLNSTIFRPSVLTLTGIPGLESVQFWIGIPFCIMYIIALLGNSLLLVVIKVERSLHEPMYLFLAMLGATDISLSTSILPKMLGIFWFHLSTIYFDACLLQMWLIHTFQGIESGILFAMAMDRYVAICDPLRHASIFTQRLLTQIGVGVTLRAALFVAPCLFLIKCRLKFYWTTVVSHSYCEHMAIVKLAAEDVHVNKIYGLFVAFSILGLDIIFITLSYIRIFITVFKLPQKEARLKAFNTCVAHICVFLEFYLLAFFSFFTHRFGYHVPSYIHILLSNLYLLVPPLLNPIVYGVKTKQIRDQVSKILYCNYSY

SEQ ID NO: 1326 - protein, 318 aa, Mus musculus
MSGANSSSLTPEFFILNGVPGLEDAHVWISLPFCFMYMIAVVGNCGLIYLIGHEEALHRPMYYFLALLSFTDVTLCTTTVPNMLCIFWFNFKKIGFNSCLVQMFFVHMLTGMESGVLMLMALDRYVAICYPLRYTTILTNPVIAKAGLATFLRSVMLIFPFTLLTKRLPYCRGSLIPHTYCDHMSVAKVSCGNAKVNAIYGLMVALLIGVFDICCISVSYTMILRAVVSLSSADARHKAFSTCTSHICAIVITYVPAFFTFFTHRFGGHTIPHHVHIIVANLYLLLPPTMNPIVYGVKTKQIRESVIKFLLGDKMGIT

SEQ ID NO: 1327 - protein, 317 aa, Mus musculus
MPNINLLQNAPSNITEAHPLSFLLLGIPGLEATQFWLGFPFCVVYLTALVGNLIILFVIWTDRTFHQPMFYFLAMLSVIDLSLSTATIPKMLGIFWFSLQELCFACCVAQVFFIHFFTVMESIVLLAMGFDRYVAICNPLRYTTILTNRIIVVIAVLVVIRSLCMIVPIIFLLLRLPYCGHRIIPHTYCEHMGVARLACASIRANIYFGLGNISILFLDVFLIIVSYARILYAVFHLPSQDARLKALNTCSSHICVILAFFGPALFSFLTHRFGHNIPQYIHILLANLYVVIPPALNPVIYGIRTKQIQQRVKNLFV

SEQ ID NO: 1328 - protein, 319 aa, Mus musculus
MAPSNSSVSVSSTFYLTGIPGYEEFHHWISIPFCLIYIIGVTGNCSILHIVRTDPKLHEPMYYFLAMLSLTDMAMSLPAMVSLFRVLWSISREIQFNICVVQMFLIHTFSFTESSVLLAMALDRYVAICHPLRYATILTPKLIAKIGIAALLRSAIPLIPLLVRLAFFSFCRSHVLSHSYCLHQDIIRLACADIRFNVIYGMVVILMLWGMDSLGILITYVFILHSVLRIASREGRLKALNTCASHICAVLILYVPMIGLSIVHRFAKHSSPFVHIFMAHIYLMVPPVLNPIIYSVKTKQIRQGIFHLICPHKINSSAM

SEQ ID NO: 1329 - protein, 317 aa, Mus musculus
MVGFNSNESSATYFILIGLPGLEEVQFWLAFPLCSLYLIAVLGNLTIIYIVRTEHSLHEPMYIFLCMLSGLDILISTSSMPKMMAIFWFNSTTIQFDACLVQMFAIHSLSGMESTVLLAMAFDRYVAICHPLRHATVLTLPRVAKIGMAAVVRGAVLMAPLPVFIKRLPFCRSNILSHSYCLHQDVMKLACADIRVNIIYGLIVIISAIGLDSLLISFSYLLILKTVLGLTREAQAKAFGTCVSHVCAVFIFYVPFIGLSMVHRFSKRRDSLLPVIMANIYLLVPPVLNPIVYGVKTKEIRQRILRLFLVTTHTSDH

SEQ ID NO: 1330 - protein, 314 aa, Mus musculus
MPSFNESTAYPPVFFLTGIPGLETSHTWISIPFCCLYAIAISGNSMILFVIITESSLHEPMYYFLSMLSFTDLGLCLSTLVTVLGIFWFNVREISFDACIGQMFFIHGFTFMESSVLLVMAFDRFIAICNPLRYAMILTNSRIIAVGFAIIIRGTTALVPLLLLLKRLSFCRSHVLHHSYCFHPDVMKLSCSDTRINSAFGLAIVISTAGLDSVLILLSYVLIIHSVLCIASKEERKKAFGTCVSHLSAVAIFYIPMISLSLVHRFGKHAPPFVHTLIANVYLLIPPVMNPIIYSVKTKQIRKAMLKVFFVKPS

SEQ ID NO: 1331 - protein, 316 aa, Mus musculus
MLILNNTHSQLPTFLLTGIPGLRAAQVWISIPFCLLYVIALSGNSMILLVIVREQSLHEPMYYFLSMLSITDLSLSLCTLSTTLGVLWFEAREINLNACIAQMFFLHGFTFMESGVLLAMAFDRFVAICDPLRYTTILTNARIAQIGTIVLIRNVAVMLPVVLFVKRLSFCSSLVLSHSYCYHVDVIQLSCTDNRINSVLGLFALFSTTGFDCPCILLSYVLIIRSVLSIASSDERQKAFNTCISHISAVAIFYIPLISLSLVHRYGHSAPAFVHTVMANVFLLIPPVLNPIIYSVKTKQIRKAILKVLNQKQNQL

SEQ ID NO: 1332 - protein, 313 aa, Mus musculus
MSVINDSSLYPRFLLTGFPGLETRYGLISIPIFLVYVTSIAGNITILFIIRTESSLHQPMYYFLSMLALTDLGLSTTTLPTMFSVFWFQAREIPFNACLVQMYFIHVFSIIESAVLLAMAFDRFVAIREPLRYAAILTNTVIVGIGLAIAGRALALVFPASFLLKRLQYRVINILSYPFCLHQDLIKTTVSSRWVSSIYGLMVVIFSMGLDSLLLLLSYILILGTVLSIASKAERIKALNTCISHICAVLTFYTPMIGLSMIRRYGQNASPIVHVIMANVYLLVPPLMNPIVYSVKTKQIRDRILRKLKKQKV

SEQ ID NO: 1333 - protein, 318 aa, Mus musculus
MADHNHSQSQHLYFILTGIPGLEQKYYWMAFPLGAIYVIALFGNGVIISTIKSESSLHIPMYYFLCMLAFADMGLTLCTLPSMLGIFWFNYKFITFDGCLVQMYFIHTFSAIESGVLVAMAIDRVIAIWSPLRYGTILTNGVVCKIGMLILSRAVCVVFPVPFLIKRLPFYRSNILSHSFCLHQDVMRLACASTRVNSLYGLIAVIFTKGSDSLSILISYVFILRTVMAIASGEGRLKALNTCVSHICAVLIFYVPLIGVSVIHRFGKHLSPLTHALMANAYLLVPPVLNPIVYTVKTKEIRKKIIQIFIRTKITTEG

SEQ ID NO: 1334 - protein, 314 aa, Mus musculus
MVASSNSSSHPLFFMLLGIPGLENYQFWIAFPFCVMYIVALTGNITILYIIRIDHTLHEPMYLFLALLAITDLVLSSSTQPKMLAILWFHSHEIEYNACLIQVFFIHAFSSVESGVLMTMALDRYVAICFPLRHSSILTTSVVIKLGAAVMVRGLLWVSPFCFMVSRMPFCPNKVIPQSYCEHMAVLKLVCADTRVNRGYGLFVAFSVVGFDIIVISVSYVMILRAVLRLPSGEARLKAFGTCASHVCVILAFYIPALFTFLTHRFGHHVPRVVHIMFANFYLLVPPMLNPIIYGVRTKQIRDRVIRGFRRKDP

SEQ ID NO: 1335 - protein, 319 aa, Mus musculus
MLQMQDNTEFLSNFTSKLSTFLLTGIPGLESAHGWISIPFCCLYATALSGNSMILFIIVTQHSLHEPMYYFLSVLSATDLGLTFSTMSTTLRILWFQANEISLDLCIVQMFFLHGFTCTESGVLVAMAFDRYVAICKPLRYTMILTNSRIIQIGFLVIMRTLLLIIPLLLLLKPVSFCKRNTLSHSYCYYPDVIKLACSDTRANNICGLVDLILTTGLDIPCIVLSYILIIRSVLNIASSEERHKAFSTCVSHIAAVAVFYIPMFSLSLVHRYGRSVPKVVHTMMANVYLLLPPVLNPIIYSVKTKQIRKAILSLLFAK

SEQ ID NO: 1336 - protein, 316 aa, Mus musculus
MSTLENTTASSIIFLLTGMPGLEAFHTWISIPFCFLYATALSGNSLILFAIITQPSLHEPTYYFLSMLSTTDLGLSISTLATMLGIFWLNAREISFNACLSQMFFIQLFTVMESSVLLAMAFDRYVAISNPLRYASVLTDVKIVVIGVAIITRGTLIQTPLAVLLKRLSFCSSHVLHHSYCFHPDIMKLSCTDTRINSAVGLTALISTAGVDSVFIILSYVLIIRTVLSIASPEERKKAFSTCISHIGAVAVFYIPLISLSFVHRFGKRAPPYVHTLIANAYLLIPPVMNPIIYSVKTKQIRKAVLKVLHSSMTKS

SEQ ID NO: 1337 - protein, 322 aa, Mus musculus
MSPLSAQDTSNISSLMAPTFLLVGLPGLEAAPSWWSVPLITIYLFSAFGNGTILWIIALEPTLHRPMYFFLFLLSVSDVGLATVLMPTLLGLAFADAHTVPASACLLQMFFIHVFSVMESSVLLAMAFDRAVAICRPLHYPVLLTNGVIRKIAVAIAFRCLSLHLPLPILLARMPYCRPQVLTHSYCLHPDMARLACPEAWGAVYSLVVVLSAMALDPLLIFFSYGLIGRALQGVGSAEDRWKAGQTCAAHLSAVLLFYIPMILLALIDRFKLPLPPPAHTLLSYVHFLLPPLMNPVLYSVKMKEIREKILKRLLPTKVGCA

SEQ ID NO: 1338 - protein, 316 aa, Mus musculus
MGAENNESLDLLSIFLTGIPGLEAQHGWLSIPFFIMYIVAIVGNSLIMIAVQQESALHEPMYLFLSMLAITEVGVSVSTLPTVMGILWFNAYRIDFDGCLAQMFFIHTFSGMESGVLLAMSYDRFVAIYNPLRYTAILTLPRIISMGLGITLKSVALMAPLPILLKQLPYCHINILSHSYCLHSDLIQLPCADTRLNSILGLAIVLATFGLDSLLIVVSYGLILYTVMGIASGEGRKKTLNTCVSHICAVLIYYVPMIGVSVMHRVAKHASPVVHTLMSSIYLFVPPVLNPIIYSVKTRPIQQGIANLFSCKKGSI

SEQ ID NO: 1339 - protein, 317 aa, Mus musculus
MVGNITHQQIASFFLVGIPGLENVHCWIGISVCLLFVLTLLGNSIVIATIKLEPSLHQPMYFFLCMLAMNDMCLSSSAALKMLGIFWFDAHWINFDACLTQMYFIHTLCIMESAILVAMAFDRFVAICIPLHYASILTTSMVIKLGLVGLMRCVLMVLPCPILIKRLPYYTKYVIPHTYCEHMAVVKLASANTLINRAYGISVALSVITVDLGLIATSYVKILQSVFRLSSQNARSKALGTCAAHVCTILVSYIPALFSFLSHRIGKKVPPSVHIIFASMYLLVPSAVNPVVYGVKTKQIRDRVIDLFFTHKKFSEK

SEQ ID NO: 1340 - protein, 319 aa, Mus musculus
MSYSNHSSTSFFLTGLPGLETVYLWLSIPLCTMYIASLAGNGLILWVVKSEPSLHQPMYYFLSMLAVTDLGLSVSTLPTMLTIYMMGVSEVALDMCLAQLFFIHTFSIMESSVLLTMAFDRVVAISSPLHYATILTNPRVASLGMVILVRSIGLHIPAPIMLKKLPYCQKRHLSHSYCLHPDVMKLACTDTRINSAYGLFVVLSTLGVDSVLIVLSYGLILYTVLSIASKTERLKALNTCVSHICSVLLFYTPMIGLSMIHRFGKWASPCSRVLLSYLHFLTPPVLNPVVYTIKTKQIRQRIWCIFRCGGRSIGHIQGH

SEQ ID NO: 1341 - protein, 315 aa, Mus musculus
MAISKHSNASSFFFILMDLPGLETSHCWTAIPICLIYVLSVLGNITIMHIVKSVPSLHTPMYLFLSMLSMADLGLSASTLPSMVAVFLLGQRMIGAVACFMQLFFIHTFSVIESAVLLAMAFDRCVAIREPLRYATILTTRRIGAIGLAVVIRSAALHLPLPVLLGRLTFQPVSALSHSYCVHPDVLRLSCSSTLVNSGFGLFVMLSTLGMDAVLILLSYVLILKTVLSIASNAERLKAFNTCISHICAVLLFYTPLVSLSMIHRFGKKKLPAQVYMLLSYLHFLMPPMLNPIVYSVKTKEIRVRILKMLHPKKH

SEQ ID NO: 1342 - protein, 313 aa, Mus musculus
MSEFNTTFQPSVFILTGLRGLVGARLWLGPLLSLMYITTLAGNCTVIYLVRTERSLQEPQYQFLSMLAGADIVLSVSTLFSVLKVFIFDLYEIAFDSCLAQLFFIHTSSSMGSGILLAMAFDRFVAISHPLQYTTILTNSRVTRMGLAAFLRGVALMMPLPILLKRLPFCKGQLLSYSYCIHPNVMKLACGQVKINIFYGLVLVIFSFGVDFLLIAISYALIFQAVMGIASREGQMKALNTCLSHIFIVFIYYGPLLAITVMHRISRRSSPIAHAVLGNIYLFMPPMLNPIVYSLKTKQIRSALRKSLKIQRR

SEQ ID NO: 1343 - protein, 314 aa, Mus musculus
MTTLNYTVVSHTVFHLLGIPGLEDQHMWISIPFFISYITALLGNSLLIFIILTRPSLHGPMYLFLCMLAGADIVLSTSTVPQALSIFWFHAGEISLDRCITQLFFIHSTFISESGILLVMAFDRYIAICYPLRYTTVLTNSLIGKIGVGIFLRSYGTIFPIIFLLKRLTFCKNNIIPHTYCEHIGLAKYACNSIRVNIWYGFSVLILTVVLDVVLIFVSYVLILRAVFRMPSQDARHKALNTCGSHVCIIILFYGPGIFTTLTQRFGRHIPPHIHILLANVCILAPPMLNPIIYGIKTKQIQEQMVHVLFTNHK

SEQ ID NO: 1344 - protein, 318 aa, Mus musculus
MATGNLTHVTEFILMGVTDRPELQVPLFFLFLVIYLLTAAGNLGIITLTSVDSRLQTPMYFFLRHLAVINFGNSTVIAPKMLVNFLVSKKTTLYYECATQLGGFLVFMVSEIFMLAVMAYDRYVAICNPLLYMVVVSRRVCLLLVFLTYLFSFVTAIVVTPCVFSVSYCSSNVINHFYCDNVPLLALSCSDTHLPETVVFFFSATNLFFSMIIVLISYFNIVLAILRIRSSEGRKKAFSTCASHMMAVTVFYGTLLFMYLQPRTNHSLDTDKIASVFYTLIIPMLNPVIYSLRNKDVKCALKEFLKNPMQKIQSYMNL

SEQ ID NO: 1345 - protein, 314 aa, Mus musculus
MGGEAHNSSGLPPFILTGLPGMETSQHWLFLLLGVLYTVSIVGNALILFIIKEEESLHQPMYYFLSLLSLNDLGVSFSTLTTVLGVFCFLLREISFNSCMSQMFFIHLFSFMESGILLAMSFDRYVAICNPLHYSTVLTDARVMWMGVCVFFRSFCMIFPLPFLLKRLPFCKANVLSHAYCLHPDMIRLPCGDITINNIFGLFIVISTFGLDSALILLSYVLILRSVLAIASREERLKTLNTCVSHLCAVLIFYVPMVGVSMAARYGRHAPRYVHTLLSLVYLFVPPMLNPVIYSIKTKEIRRRLHKILLGTKI

SEQ ID NO: 1346 - protein, 320 aa, Mus musculus
MTSSTYLNHTNLRDIWYTMIGIPGLEDAHIWLSIPIFSMYIVAVIGNTFLILLISIEHSLHEPMYFFLTMLALADIFLSTVTIPKVLAIFWFQDRSISFASCVSQMFFLHFIFVTESGILLSMAFDRYVAICYPLRYTTILTPSVIIKMGIAAVTRSFFICFPLIFLVYRLTYCGKSIIRHSYCEHMGIARLACDSIKVNIYYGLIVALFSIFLDVVLIIVSYARILCAVYRIPSQDARLKALSTCGSHVCVILLFYMPVFFSSLAHRFGGDSIPLHVHILLANLYVVLPPSLNPIIYGVKTKQIQERVVQLFSLNKVIC

SEQ ID NO: 1347 - protein, 320 aa, Mus musculus
MSSCNFTHATFLLIGIPGLEEAHFWFGFPLLSMYAVALFGNCIVVFIVRTERSLHAPMYLFLCMLAAIDLALSTSTMPKILALFWFDSREITFDACLAQMFFIHTLSAIESTILLAMAFDRYVAICHPLRHAAVLNNTVTVQIGMVALVRGSLFFFPLPLLIKRLAFCHSNVLSHSYCVHQDVMKLAYTDTLPNVVYGLTAILLVMGVDVMFISLSYFLIIRTVLQLPSKSERAKAFGTCVSHISVVLAFYVPLIGLSVVHRFGNSLDPIVHVLMGDVYLLLPPVINPIIYGAKTKQIRTRVLAMFKISCDKDIEAGGNT

SEQ ID NO: 1348 - protein, 329 aa, Mus musculus
MSNTISQTMESPNHTDLDPSIFFLLGIPGLEQFHMWLSLPVCCLGTATIVGNITILVVVATEPTLHRPVYLFLCMLSTIDLAASFSTVPKLLAILWCGAGHISASACLTQMFFIHAFCMMESTVLLAMAFDRYVAICHPLRYSTILTDTIIARIGVVAMMRGSLLMLPCPFLIGRLSFCQSHVIPHTYCEHMAVVKLACGDTRPNRVYGLTAALLVIGVDLFCIGLSYALIAQAVFRLSSQEARSKALGTCGSHVCVILISYTPALFSFFTHRFGHHVPLHIHILLANVYLLFPPALNPVVYGVKTREIRERVAKVFQWGQGTRLKISK

SEQ ID NO: 1349 - protein, 317 aa, Mus musculus
MMLSAAIPNGTAFHPPTFVLLGIPGMQDQHVWIAIPFCSMYILALVGNGTILYIIITDRALHEPMYLFLCLLSITDLVLCSTTLPKMLAIFWLRSHVISYHGCLTQMFFVHAVFATESAVLLAMAFDRYVAICRPLHYTSILNAVVIGKIGLACVTRGLLFVFPFVILIERLPFCGHHIIPHTYCEHMGIAKLACASIKPNTIYGLTVALSVTGMDVVLIATSYILILQAVLRLPSKDAQFRAFSTCGAHICVILVFYIPAFFSFFTHRFGHHVPPQVHIILANLYLLVPPVLNPLVYGINTKQIRLRILDFFVKRR

SEQ ID NO: 1350 - protein, 318 aa, Mus musculus
MISSKAFVNITFFQPQSFLMTGIPGLEFAHGWISIPFSSMYTVALTGNCLILLAVRRTHSLHQPMYYFLSMLALSDVGLSLSTLPSTLAVLWFDYRFIDFNACLIQMFFLHFFSVVESSVLLAMSFDRFVAISNPLRYASVLTNNVIIRIGVAITTRATLSLLPLPFLLKRLNYCPGKILLSHSFCFHADVMKLACADITVNILYGLYVVLSTVGIDSLLIVMSYSLILHTVMGLASPRERVRTLNTCVSHILAVLVFYIPVIGVSMIHRFGKHLPHIVHALVAYVYLVVPPVLNPIIYSVKSKPIRGAMFRVLSRKG

SEQ ID NO: 1351 - protein, 312 aa, Mus musculus
MALFNVTHPASFLLTGIPGLESLHPWLAGPLCVMYAVALGANTVILQAVRVEPILHAPMYYFLSMLSFSDVAMSMATLPTVLRTFCFDARSIAFDACLVQMFLIHSFSMMESGILLAMSFDRYVAICNPLHYATVLTNEFIAGMGLAVTARSFITLFPLPFLIKRLPICKSNVLSHSYCLHPDMMKLACADITINSIYGLFVLVSTFGMDLLFIFLSYVLILRSVMAIASHEERLKALNTCVSHILAVLAFYVPMIGVSTVHRFGKHAPRYIHVLMSNVYLFVPPVLNPLIYSAKTKEIRRAIFRMFRRIKL

SEQ ID NO: 1352 - protein, 309 aa, Mus musculus
MEPRNNTHILEFFLLGFSQDPNLQPVICGLFLSMYLITVVGNLLIILTIISDANLHTPMYFFLSNLSFVDICFVSTTVPKMLVNIQTKRKSISYADCITQMYFFLIFVELDNFLLAVMAYDRYVAICHPLHYTGIMNRRLCGFLVLVCWIVSVLHALLQSMMVLRLSFCTDLEIPHFFCELNQVAQLTCSDTFLNDVVMYFALVLLAIVPLFGILYSYSKIVSSIRAMSTVQGKYKAFSTCASHLSVVSLFYFTGLGVYLSSAVSHSSQASATASVMYTVVTPMLNPFIYSLRNKDVKGALKRLLGVKL

SEQ ID NO: 1353 - protein, 312 aa, Mus musculus
MPSNNETASHPSLFHLLGIPGLEAFHIWIAFPFFVVYLIALVGNFTILCVIKNEQSLHQPMFYFLALLSFIDLGLSTSTIPKMLGIFWFNLREISFEGCLIQMFFIHTYTGMESVVLLAMAIDRFVAICYPLRYTSVLTNKVVAVMASVVIGRPVLLVIPFCPLLKRLPFCGHYIIPHTYCEHMGIARLACANIRINIIYGLFTIAALIFDLILIAFSYAWILQAVFRLPSRDARHKALSTCGSHVCVILAFYTPAFFSFMTHRFGRNVPRYIHILLANLYVVVPPCLNPVIYGVRTKQIREGVLKIFVKKE

SEQ ID NO: 1354 - protein, 317 aa, Mus musculus
MIFSNNSHLLPHTFFLTGIPGLTAAHVWISLPFCFMFVLSLTGNAVLLSLIWIEHRLHQPMFLFLAMLSFVDLVLSLSTLPKMLAIFWFGATAISSYACLSQMFLIHAFSAMESGVLVAMALDRFVAICNPLHYATILTPEVVAKIGGLVALRGVGLTIFFPSLACRLSYCGSHTIAYTYCEHMSVVKLACGAITVDSLYAFAVAIFLGVGDMAFIAYSYGQIVKTVMRFPSPEARGKAGSTCTAHVCVILFFYGPGFLSVVMQRFGPSTASAAKVILANLYLLFPPALDPIVYGVKTKQIRECLFTIIGSKKIEPT

SEQ ID NO: 1355 - protein, 312 aa, Mus musculus
MEKWNQSSSDFTLLGLLPQNQTGLLLLMLIIFVFSLALCGNSGMIHLIRVDPRLHTPMYFLLSQLSLMDLMYISTTVPKMAFNFLSGQKSISFLGCGVQSFFFLTMACSEGLLLASMAYDRFVAICHPLHYPIRMSKIMCLKMIIGSWILGSINSLAHTVYALHIPYCHSRSINHFFCDVPAMLPLACMDTWVYEYMVFVSTSLFLLLPFLGITASYGRVLFAVFHMRSKEGKKKAFTTCSTHLTVVTFYYAPFVYTYLRPRSLRSPTEDKILAVFYTILTPMLNPIIYSLRNKEVLGAMTRVLGTFPSTKP

SEQ ID NO: 1356 - protein, 321 aa, Mus musculus
MYSIRFTMNMKYINQTVVSGFILLGLTDDTKLQLIIFSVFLSMYLATVIGNLLIILATNFDSHLHTPMYFFLSVLSFNDIFLVTCTIPKMLVNIQTGNQNITYGGCLTQVCFVLVSVGMENCLLAAMAYDRYVAICHPLRYRIIMNPYLCILMVAFSMIGSMANALVNGLMVLHLSFCTELIIPHFFCELTQITKLACSNTLIDNILIYISSCIFGGVPLSGIILSYCQIATTVLRMSSSEGRYKAFSTCGSHLSVVFLFYGTGFGVYISSTITESSRKSAVASVLYSVVPQMINPFIYSLRNRDMKEALKKLISRILFPL

SEQ ID NO: 1357 - protein, 311 aa, Mus musculus
MGTFNASLGKGFILVGFSDFPQLEVFLFVFILVFYLLTLLGNTTIIALSRLDVRLHTPMYFFLSHLSFLDLCYTTSTVPQLLINLCGLDRTISYGGCVAQLLIFLALVSTECLLLGVMAFDRYAAVCRPLHYTTIMHPQLCQGLAISSWVSGLVNSVIQTGLVMAMPLCSHRLNHFFCEMPIFLKLACEDTNGTEVKMFVARTIILIFPAALILGSYGHIARAILRIKSMAGRRKAFGTCGSHLIVVSLFYGSGIYTYLQPIHRYSENEGKFVAVFYTILTPILNPLIYTLRNKDVKGALWKVLGKGTDLV

SEQ ID NO: 1358 - protein, 311 aa, Mus musculus
MGSFNTSFRQGFFLVGFSDFPQLELLLSVLISIFYSLTLFGNSTIIILSQLDARLQMPMYFFLCHLSFLDLCYTTSIVPQLLINLQGYDRTISYGGCVAQLFLFLALATTESVLLVVMAFDRYVAVCRPLHYTTIMHPVLCLSLAIVSWVGGFMNSLIQTSLMMAVPLCGHRLNHFFCEIPSLLKLACEDTEGTGAKMFVVRVVFLIFPITLILSSYANIAQAVLKTKSMAGCKKALGTCGSHLVVVSMFYGAAMYTYLQPKGTYSESKGKFVALFYIIVTPMLNPLIYTLRNKDVKGALWKVLGRATDLG

SEQ ID NO: 1359 - protein, 311 aa, Mus musculus
MDVDNQTRVTKFILVGFPGSLSMRAAVFLMFLVAYILTVAENVIIILLVQQNRPLHKPMYFFLANLSFLETWYISVTVPKLLFSFWSMSNSISFTHCMIQLYFFIALMCTECVLLAAMAYDRYVAICRPLHYPTIMSHGLCFRLALGSWVIGFGISLAKIYFISRLSFCGPNVINHFFCDISPVLNLSCTDMSIAELVDFVLALVIFLFPLSITVLSYGCILATVLRMPTGKQKAFSTCASHLVVVTIFYSATIFMYARPRAIHAFNMNKVISIFYAIVTPALNPFIYCLRNREVKEALKKLIYCQVIRSD

SEQ ID NO: 1360 - protein, 316 aa, Mus musculus
MEATTCNGSVDGSTVFYLVGIPSLPEPFYLPVFFLFLLFYLLILVGNALILVAVVAERSLHKPMYFFLINLSALDILFTTTTVPKMLSLLLLGDRFLSFPACLLQMYLFQSFTCSEAFILVVMAYDRYVAICRPLHYPVHMTPQTNTALAASAWITALLLPVPAVIKTSQMVYNDIAYIYHCFCDHLALVQSSCSDTTPQTLMGFCIAMVVSFLPLLLVLLSYVRILTSVLQINSKEGRSKAFSTCSSHLLVVGTYYSSIAIAYVAYRADLPLDFHIMGNVVYSILTPILNPLIYTLRNKDVKAAITKIVYLKGMM

SEQ ID NO: 1361 - protein, 316 aa, Mus musculus
MEPWNSTLESGFILVGILDGSGSPELLCATVTTLYMLALISNGLLLLVITVDARLHVPMYLLLRQLSLIDLLFTSVVTPNTVVDFLLRDNTISFEGCALQLFSAMTLGGAEDLLLAFMAYDRYVAICHPLNYMIFMSPKACRLMVAISWILASLSALGHTVYTMHFPFCMSQEIRHLLCEVPPLLKLACADTSQYELMVYVTGVIFLLLPLSAIITSYSLILFTVLHMPSNEGRKKALVTCSSHLTVVGMFYGGATFMYVLPSSFHSPKQDNIISVFYTIVTPALNPLIYSLRNKEVIGAVRRVLGRHILPAHATV

SEQ ID NO: 1362 - protein, 315 aa, Mus musculus
MWINNQSSVDDFILLGFSDRPWLETPLFVIFLVAYIFALFGNISIILVSRLDPQLDSPMYFFVSNLSLLDLCYTTSTVPQMLVNLRGPEKTISYGGCVAQLYIFLALGSTECILLAIMAFDRFAAICRPLHYPIIMNQKRCIHMATGTWISGFANSLVQSTLTVVAPRCGQRVIDHFFCEVPALLKLACTDTSVNEAELNVLGALLLLVPLSLILGTYVFIAQAVLKLRSAESRRKAFNTCASHLLVVSLFYFTAISMYVQPPSSYSHERGKIMALFYGIVTPTLNPFIYTLRNKDVKAALRRALTKEFWVKARQ

SEQ ID NO: 1363 - protein, 322 aa, Mus musculus
MIHSNITPIHPAFFVLVGIPGLEAYHTWLSIPLCLMYVTAVLGNSILIMVIITERNLHEPMYFFLSMLAITDILLSTTTVPKALTIFWLHAHNIAFDACVTQVFFVHTMFVGESAILLAMAFDRFIAICAPLRYATVLTWSTVGRIALAIVIRSICIIFPVIFLLKRLPFCRTNIVPHSYCEHIGVARLACADITVNIWYGFSVPIVMVIVDVILIAVSYSLILRAVFRLPSQDARHKALSTCGSHLCVILMFYVPSFFTLLTHRFGRNIPRHVHILLANLYVVVPPMLNPIVYGVKTKQIREGVVHWFLDIKTLCCSSPLG

SEQ ID NO: 1364 - protein, 310 aa, Mus musculus
MSEANSSSLTPEFFILNGIRGLEDAHVWISLPFCFMYMIAVVGNCGLIYLIGHEEALHRPMYYFLTLLSFTDITLCTTTVPNMLCIFWFNLKKIGFKACLAQMFFVHTFTATESGMLMLMALDRYVAICYPLRYGTILTNPVIAKASLATFLRSVAFILPFTFLTKRLPYCRGNLIPHAYCDHMSVAKISCGNVKINAVYGLLVALVVCAFDIFCITVSYTMILRAVMNLSSADARHKAFSTCTSHICAIVITYVPAFFNFFTHRFGAHTIPHHIHIIVANLYLLLPATMNPIVYGVKTQADSGECNQIF

SEQ ID NO: 1365 - protein, 318 aa, Mus musculus
MSGANSSSLTPEFFILNGVPGLEDAHVWISLPFCFMYMIAVVGNCGLIYLIGHEEALHRPMFYFLALLSFTDVTWCTTTVPNMLCIFWFNFKKIGFNSCLAQMFFVHMLTGMESGVLMLMALDRYVAICNPLRYTTILTNPVIAKACLATFLRSVMLIFPFTLLTKRLPYCRSILIPHTYCDHMSVAKVSCGNAKVNAIYGLMVALLIGVFDICCISVSYTMILRAVVSLSSADARHKAFSTCTSHICAIVITYVPAFFTFFTHRFGGHTIPHHVHIIVANLYLLLPPTMNPIVYGVKTKQIRESVIKFLLGDKMGFT

SEQ ID NO: 1366 - protein, 316 aa, Mus musculus
MIKFNGSVFMPSVLTLVGIPGLESVQCWIGIPFCVMYIIAMIGNSLILVIIKSEKSLHIPMYIFLAILAVTDIALSTCILPKMLGIFWFHMPQISFDACLLQMELIHSFQATESGILLAMALDRYVAICNPLRHATIFSPQLTTCLGAGALLRSLITTFPLILLIKFCLKYFRTTIISHSYCEHMAIVKLAAQDIRINKICGLLVAFAILGFDIVFITFSYVRIFITVFQLPQKEARFKAFNTCIAHICVFLQFYLLAFFSFFTHRFGAHIPPYVHILLSDLYLLVPPFLNPIVYGIKTKQIRDQVLKMFFSKKPL

SEQ ID NO: 1367 - protein, 315 aa, Mus musculus
MIKFNGSVFMPSVLTLVGIPGLESVQCWIGIPFCVMYIIAMIGNSLILVIIKSEKSLHIPMYIFLAILAVTDIALSTCILPKMLGIFWFHMPQISFDACLLQMELIHSFQATESGILLAMALDRYVAICNPLRHATIFSPQLTTCLGAGALLRAFILVSPSILLIKCRLKYFRTTIISHSYCEHMAIVKLAAQDIRINKICGLLVAFAILGFDIVFITFSYVRIFITVFQLPQKEARFKAFNTCIAHICVFLQFYLLAFFSFFTHRFGAHIPPYVHILLSDLYLLVPPFLNPIVYGVKTKQIRDQVLKMLFSKKH

SEQ ID NO: 1368 - protein, 312 aa, Mus musculus
MSESLPVTLFLTGIPGLEFAHLWIAIPFCVMYVVALLGNAALILIIGTESVLHTPMYLFLCLLSLTDLALSSTTVPKMLAILWLHSNEISFGGCLAQMFCVHSIYALESSVLLAMAFDRYVAICNPLRYTTILNHTVIAQIIFAGIVRSVAIVSPFIFLLRRLPYCGHRVMTHTYCEHMGIARLACANITVNIVYGLTVALLAMGLDSILIAISYGFILRAVFRLPSRDAQHKALSTCGSHLGVILVFYIPAFFSFLTHRFGHNRVPKHVHIFLANLYVLVPPVLNPIIYGARTKEIRSRLLKLLHLGKDLV

SEQ ID NO: 1369 - protein, 312 aa, Mus musculus
MVMHNVSSYNTGPFTLSGIPGLEQYHVWISIPFCFIYLVAILGNSILLYLIAVEHSLHSPMFFFLSMLAMTDLILSTTCVPKTLSIFWFGPQEISFPGCLTQLFFLHYSFVLDSAILLAMAFDRYVAICSPLRYTTILTPKTIVKIAVGISFRSFCVFVPCVFLVNRLPFCRTHIIAHTYCEHIGVARLACADISINIWYGFCVPIMTVIIDVILIAISYTLILCAVFRLPSRDARQKALSTCGSHVCVILMFYIPAFFSILAHRFGRNVPRTFHIMFANLYVIIPPALNPIVYGVKTKQIRDKAILLLFPK

SEQ ID NO: 1370 - protein, 319 aa, Mus musculus
MMYSLMLASRNSSSHSTFFILLGIPGLENYQFWVAFPFCVMYIVAVTGNITILHIIRIDHTLHEPMYLFLAMLATTDLVLSSSTQPKMLAILWFHDHKIEYHACLIQVFFIHAFSSVESGVLMTMALDRYVAICFPLRHSSILTTSAVIKLGAVVMVRGLLWVSPFCFMVSRMPFCPNKIIPQSYCEHMAVLKLVCADTRVNRGYGLFVAFSVVGFDIIVISVSYVMILRAVLRLPSGEARLKAFGTCASHIGVILTLYIPALFTFLTHRFGHHVPRVVHIMFANVYLLVPPMLNPIIYGVRTKQIRDRVTRGFCVKGS

SEQ ID NO: 1371 - protein, 319 aa, Mus musculus
MMHSLMLASRNNSSHSTFFILLGIPGLENYQFWVAFPFCVMYIVAVTGNITILHIIRIDHTLHEPMYLFLAMLATTDLVLSSSTQPKMLAILWFHDHKIEYHACLIQVFFIHAFSSVESGVLMDMALDRYVAICFPLRHSSILTTSVVIKLGVAVMVRGLLWVSPFCFMVSRMPFCPNKVIPQSYCEHMAVLKLVCADTRVNRGYGLFVAFSVAVFDLAVISVSYAMILRAVLRLPSGEARLKAFGTCASHIGVILTLYIPALFTFLTHRFGHHVPRIVHIMFANVYLLVPPMLNPIIYGVRTKQIRDRVTQAFCGKGS

SEQ ID NO: 1372 - protein, 317 aa, Mus musculus
MILPNDTQFHPSTFLLLGIPGLESLHIWIGFPFCVVYMIALLGNLTILFVIKTESSLHQPMFYFLAMLATIDLGLSTATIPKMLGIFWINLREILFEDCLIQMFFIHKFTLMESTVLLAMAYDHYVAICIPLRYSTILTNKVVSMIGIAVLVRAIIFVIPFIFLILRLPFCGHHIIPHTYCEHMGLARLSCASVKANVIYGLCAICNLLFDIVAIVLSYIQILRVVFHLPSREARLKSLNTCGSHVCVILAFYTPALFSFMTHRFGRNVPRYIHILLANLYVVVPPMLNPVIYGVRTKQIYDRVKKILLQVRGKEKE

SEQ ID NO: 1373 - protein, 317 aa, Mus musculus
MSCAPNASHSPIFLLLGFSRAGVPHTFLFLLFLFIYLTTILGNVTLVLLISWDSRLHSPMYYLLRGLSMIDLGLSTVTLPQLLVHLSSDSPAIPAARCLTQFFFFYAFGVTDTLVIAVMALDRYVAICDPLHYALVMNRQICARLLALSWVVSIVHTMLHVGLILPLCWAGDAGGNVKLPHFFCDHRPLLRASCSDTHSNELAIFLEGGFLMLGPCSLIVLSYARIGITILRLPSAAGRRRAVSTCGSHLTMVGFLYGTIIWVYFQPPSQNSRNQDMVASVMYTAITPLANPFVYSLRNKDVKGALHRLLRQGRVDS

SEQ ID NO: 1374 - protein, 322 aa, Mus musculus
MLLLNQTEVTPVSFILNGIPGLEEMHIWISFPFCSMYVIAVVGNCGLLYLIFFEDSLHRSMYYFLAMLSLTDLVMCSASIPKTLCIFWFYIKEISFTDCLVQMFFIHTFTAMESGVLMLMALDRYVAICYPLHYSTILTNPVIAKAGLATFLRAVVLIIPLIFITKHLPFCRSNILIHHTYCDQLSVAKVSCGNIKVNIVYGLMIALFIGGFDILCITVSYTMILKAVVSLSSADARQKAFSTCTAHICAIVFSYSPAFFCFFSHRFGGHIIPPSCLIIVANLYLLLPPTMNPVVYGVKTKQIRDCVIRIFSGSKDIKSHSI

SEQ ID NO: 1375 - protein, 323 aa, Mus musculus
MVMSVQNSTDLTPASFVLNGIPGLEDMHIWISFPFCSMYAVAMMGNCGLLYLIFFEDSLHRPMYYFLAMLSLTDLVMCSSTIPKTLCIFWFHLKEIGFDDCLVQMFFIHTFTGMESGVLMLMALDRYVAICYPLRYSTILTNPIIAKIGLATFLRGVLLIIPFTFLTKRLPYCRGNIINHTYCDHMSVAKLSCGNVKVNAIYGLMVALLIGGFDILCITISYTMILRAVVSLSSADARQKAFSTCTAHICAIVFSYSPAFFSFFSHRFGGHTIPPSCHIIVANIYLLLPPTMNPVVYGVKTKQIRDCVIRILSGSKDSKAHGI

SEQ ID NO: 1376 - protein, 318 aa, Mus musculus
MPIMATFNLSSFNPGFFILLGIPGLEQFHVWIGIPFFIIYLVAFAGNSILLYLIFMERSLHEPMFFFLSLLDGTDLILCNTCVPKTFSIFWLGPQHITFPGCLTQMFFLHFSFAMDSAILLSMAFDRYVAICFPLRYTTILTHQIVIKIVVAIISRSFCIIFPCVFLLKRLPFCRELVIPHTYCEHIGIARLACADISINIWYGFAVPIMTVMSDLILIGISYTVILRAVFNLPSQDARKKALSTCGSHVCVILIFYTPAIFSVLVHRFGHNIPHSFHILFANLYVSIPPAINPVIYGVKTKQIRDKINLLFFPKDNH

SEQ ID NO: 1377 - protein, 318 aa, Mus musculus
MTMSSNHTNLRDIWYTMIGIPGLEDAHVWLSIPICSMYIVALIGNTLLIFLIFTEHSLHEPMYLFLSMLALADIILSTVTTPKVLAIFWFQAGGISFTSCVSQMFFLHFMFVTESAILLAMAIDRYIAICFPLRYTTILTPSVICRMGIASVTRSFLIIFPLVFLVYRLNYCGRNIIRHSYCEHMGIARLACDSIKVNIYYGMTVPLFSIGLDIMLIIISYTLILHTVFRIPSQNARRKALGTCGSHVCVILLFYTPSLFTFFAHRFGGHTIPRHMHILFANLYVVVPPALNPIIYGVKTKQIQDRFFQLFSFTKACF

SEQ ID NO: 1378 - protein, 314 aa, Mus musculus
MPSCNNSIPQPLIFILAGIPGLESSHGWFSISFFLIFVVTIIGNVTILHIIWIEKTLHEPMFLLLATLSVVDLCLVTVTVPRMLGIFWLNAKEISLEACLTQMFFIPSFYVMESGILLAMAFDRFAAIWYPLRYTTILDSNMLVKMALAILARAVAVVTPAPILTKRLERFQTQVISYSYCAYMAVVMIACGDISNHIVYGLMVIVASVGIDLFLVILSYTLILRAVFHIPSWQARSKALSTCGSHLCVIGLFYSPVVFSVLSQILGYHMAPYLQIIIDNLYFLVPPMVNPLIYAVRTKQIRERVLRILNCERK

SEQ ID NO: 1379 - protein, 319 aa, Mus musculus
MIRRQHMEAQSNTSSILAPDFLLICFPNYQTWQHWLSLPLSLLFLLAMGANATLLITIRMEASLHEPMYYLLSLLSLLDIVLCLTVIPKVLAIFWFDNKSIGFSSCFLQMFVMNSFLTMESCTFMVMAYDRYVAICKPLQYPSIITDQFVVRAAIFVAARNGILTMPIPILSSQLRYCARIIRNCICTNMSVSKLSCDDITFNKLYQFVIGWTLLGSDLILIVLSYSFILKAVLRIKAEGAVAKALSTCGSHFILILFFSTVLLVLVITNLARERIPPDVPILLNILHHLIPPALNPIVYGVRTREIKQGIRNLLRRRL

SEQ ID NO: 1380 - protein, 315 aa, Mus musculus
MTAHKNDTNPTGVSDFLLNCFVRSPSWQLWLSLPLSLLFLLAMGANAILLITIRMEASLHEPMYYLLSLLSMLDIILCLTVIPKVLAIFWFDLRAIGFPACFLQMYIMNSFLAMESCTFMIMAFDRYIAICHPLRYPSIITDQFVVKAATFILVRNVLITLPIPILSARLHYCGRNVIENCICANMSVSRLSCNDVNVNRLYQFAIGWTLLGSDLFLIFLSYTLILRAVLRLKAEGAVAKALSTCGSHFILILFFSTILLVFILTHVAKRKVSSDVPILLNVLHHVIPAALNPIVYGVRTQEIKQGIKKLLKKGW

SEQ ID NO: 1381 - protein, 317 aa, Mus musculus
MLISNNSYEAPQSFILNGIPGLEAVHIWISLPLCTMYIISLVGNLGLVYLIYYEESLHRPMYFFLAMLSLIDLFTCTTTVPNALFIFWFKLKEINFTACLVQMFFVHGFTGVESGVLMLMALDRYVAICYPLRYATILTNPVIAKAGLATFLRGVLLMIPFPFLVKRLPFCRSNVISHTYCDHMSVVKLSCASIKINVIYGLMVALLIGVFDICCISVSYTMILRAVVSLSSADARQKAFSTCTAHISAIIITYVPAFFTFFTHRFGGHTIPPSLHIIVANLYLLLPPTLNPIVYGMKTKQIRDSIIKFFHGEKGSR

SEQ ID NO: 1382 - protein, 309 aa, Mus musculus
MDSSNRTRVAEFLLLGFLENKDLQPIIYGLFLSMYLVTVVGNMLIIVAIISGPRLHTPMYFFLSNLSFVDICFISTTIPKMLVNIQTQNKVITYAGCITQIYFFLLFVELDNFLLTIMAYDRYVAICHPMRYTVIMNYQLCGFLVLVSWIVSVLHALFQSLMMLELPFCTQPEIPHFFCEPNQVIQLTCSDAFLNDMVIYFTLVLLAIVPLAGVFYSYFKIVSSIRAMSSVHGKYKAFSTCASHLLVVSLFYCTGLGVYLSSAANHGSQTSATASVTYTVVTPMMNPFIYSLRNKDVKSALKRLFVRKL

SEQ ID NO: 1383 - protein, 319 aa, Mus musculus
METGNDTQLSEFFLLGFSENQPQIQPVIFGLFLFMYILTFTGNLLIIMAIIVDSHLHTPMYLFLSNLSFVDICFTSTTVPQMLVNIHTQSKAITYAGCIIQMYFLLLFSGLDIFLLTVMAYDRYVAICHPLHYMIIMSTRRCGLMILACWIIGVINSLLHTFLVLRLSFCTNLEIPHFFCELNQVVHQACSDTFLNDMVIYITAMLLAVGPFSGILYSYSRIVSSICAISSVQGKYKAFSTCASHLSVVSLFYCTLLGVYLSSAVTQNSHATATASLMYTVVTPMLNPFIYSLRNKDIKTALKILLGSVTRSRSMDSPS

SEQ ID NO: 1384 - protein, 319 aa, Mus musculus
MEPGNDTQLSEFFLLELSENQPQIQPLIFGLFLSMYLVTVTGNLLIIMAITADSHLHTPMYIFLSNLSFVDICFTSTTVPQMLVTIHTQSKAITYANCITQVYFLLLFSVLDIFLLTVMAYDHYVAICHPLHYMIIMNTRRCGLMILACWIIGVINSLLHTFLALRLSFCTDLEIPHFYCELNQVVHHACSDISLNDMVIYIAAMLLVVGPLSGILYSYSKIVSSICAISSVQGKYKAFSTCASHLSVVSLFYCTLLGVYLSSAVTQNAQATALASLMYTVVTPMLNPFIYSLRNNDMKKALKIVLGRVTRNRLTDLPS

SEQ ID NO: 1385 - protein, 312 aa, Mus musculus
MRGENITKVSTFILLGFPTAPELQYLLFLLFLLAYLFVLVENLAIILTVWSSASLHRPMYYFLGIMSTLEIWYVCDIIPKMLDGFLLQRKRISFIGCMTQLYFFSSLVCTECVLLASMAYDRYVAICHPLRYQVIMTTGLCVQLVAFSFASGFSISVIKVYFISSATFCGSNVLNHFFCDISPILKLACTDFSTAELVDFILAFIILVFPLLATVLSYGHITLAVLRIPSATGRWRAFSTCASHLTVVTIFYTALLFMYVRPQAIDTRSSNKLISVLYTVLTPILNPLIYCLRNKEFKDALRKALGLGQAPL

SEQ ID NO: 1386 - protein, 312 aa, Mus musculus
MRGENITKVSTFILLGFPTAPELQYLLFLLFLLAYLFVLVENLTIILTVWSSASLHRPMYYFLGSLSFLEIWYVSDIIPKMLDGFLLQRKRISFIGCMTQLYFFSSLVCTECVLLASMAYDRYVAICHPLRYQVIMTTGLCVQLVAFSFASGFTISVIKVYFISSATFCGSNVLNHFFCDISPILKLACTDFSTAELVDFILAFIILVFPLLATILSYGHITLAVLRIPSATGRWRAFSTCASHLTVVTFFYMAMIFMYVRPQAIDTRSSNKLISAVYTVLTPMMNPLIYCLRNTEFKDAVRRTLGLGNTPQ

SEQ ID NO: 1387 - protein, 323 aa, Mus musculus
MATQVHRNGSLSAVSLQGFVLVGFGGGAKTQALLFAVFLTLYVVTVLGNLTMIVVITLDARLHSPMYFFLKNLSFVDFCYSSVIAPKAMTIFLSSSKVISFAGCATQFFFFSLLVTTEGFLLAVMAYDRFMAICSPLRYPVTMCPMACARLVLGTYCGGCLNSIVQTSLTFQLPFCSSNRIDHFYCDVPPLLQLACADTTLNEFVMFGICGLIIVSTTLVVLISYGYITMTILRMRSGSGRHKVFSTCGSHMTAVSLFYGTVFVMYAQPGALTSMEQGKVVSVFYTLVIPMLNPLIYSLRNKDVKDAPRRLGQRHSLVKEDVQ

SEQ ID NO: 1388 - protein, 309 aa, Mus musculus
MRNHSTVPEFILLGLSADAQVQALLFVLFLVIYLLTLMGNLMLLLVVKVDRHLHTPMYFFLGQLSFLDLCHSSVSVPKLLENLLSVKKTISVEGCLAQVFFVFATGGTESCLLAVMAYDRYVAISSPLLYGQVMSRQLCAGLVWGSWSLAFLDAFINILVALNLDFCEAQNIHHFICELPSLYPLSCSDVSASFTTLLCSSFIHFFGNFLLILLSYIRILLTILGISSASGRSKAFSTCSSHLTAVSFFYGSGLLRYLMPNSGSTQELIFSLQYSVITPMLNPLIYSLKNKEVKAAVRRTVTKYLQCFK

SEQ ID NO: 1389 - protein, 314 aa, Mus musculus
MLDMNITLVSEFILVGFPTAPWLQILLFFIFLVVYMLIIAENLVIIFTVWSTGSLHKPMYYFLSSMSFLEIWYVSVTVPKMLDGFLLQRRHISFTGCMTQLYFFISLACTECVLLAAMAYDRYVAICHPLRYPVIMTTVYCMQLMALSYFSGFMVSVVKVYFISHVAFCGSNVMNHFFCDISPILKLACKDMSTAELVDFALAIVILVFPLITTVLSYVYIVSTILHIPSTQGRKKAFSTCASHLTVVIIYYTAMIFMYVRPRAIASFNSNKLISAVYAVLTPMLNPFIYCLRNREVKDAIKKTLGGGQCFLLC

SEQ ID NO: 1390 - protein, 324 aa, Mus musculus
MLFMLIPMATGNQTRITEFILMSFSSLPTEIQTLLFLAFLTIYLVTLLGNSLIILVTLADPMLQSPMYFFLRNLSFLEIGFNLVIVPKMLGTLIAQDTSISFLGCATQMYFFFFFGVAECFLLATMAYDRYVAICSPLHYPVIMNQETRVKLAAASWFPGFPVATVQTTWLFSFPFCATNKVNHFFCDSPPVLRLVCADTAQFEVYAIVGTILVVMIPCLLILCSYTLIAASILKIPSAKGKHKAFSTCSSHLLVVSLFYVSSSLTYFRPKSNNSPESKKLLSLSYTVVTPMLNPIIYSLRNNEVKSALSRTFHKALALRNHIT

SEQ ID NO: 1391 - protein, 317 aa, Mus musculus
MAAGNQTRIAEFILMGFSSLPTEIQTLLFLAFLTIYLVTLLGNSLIILVTLADPMLQSPMYFFLRNLSFMEIGFNLVILPKMLRTLIAQDTSISFLGCATQMYFFFFFGVAECFLLATMAYDRYVAICSPLHYPIIMNQGTHARLAAASWFPGFPVATVQTTWLFSFPFCANNKVNHFFCDSPPVLRLVCADTARFEVYAIVGTILVVMIPCLLILCSYTLIAASILKIPSAKGKHKAFSTCSSHLVVVSLFYVSLSLTYFRPKSKNSPESKKLLSLSYTVVTPLLNPIIYSLRNNEVKNALSRTFHKALALRKFIL

SEQ ID NO: 1392 - protein, 316 aa, Mus musculus
MEPWNSTLGTDFNLVGILDDSGSPELLCATFTALYMLALISNGLLILVITMDARLHVPMYFLLGQLSLMDLLFTSVVTPKAVIDFLLRDNTISFEGCSLQMFLALTLGGAEDLLLAFMAYDRYVAICHPLNYMIFMRPSICWLMVATSWILASLMALGYTTYTMQYSYCKSRKIRHLLCEIPPLLKLACADTSKYELMVYVMGVTFLIPPLAAILASYSLILFTVLHMPSNEGRKKALVTCSSHLTVVGMFYGAATFMYVLPSSFHSPRQDNIISVFYTIVTPALNPLIYSLRNKEVTGALIRVLGRYIVPAHPTL

SEQ ID NO: 1393 - protein, 326 aa, Mus musculus
MEFVLSADKKEIKSKNLNISITEFVLLGFSDVPQLQWMLFGIFLFMYLSILISNSIIMLITRTDSALQTPMYFFLSNFSFVEICYVTVTIPRMLMDLCTQKGTISLLSCAVQLCFVIMLGGMEFLLLTVMAYDRYVAICNPLHYPLVMNNKVCVQLVAACWICIIPVVTGQTYQIFSLPYCGSNKIHHFFCDIPPLLKLACGDTFVNNLAIYIASVVFIMVPFLLILVSYGKIICNVLKLATSGGRSKAFSTCSSHLIVVVLFYGTATITYAQPKAYQSETLGKLLSLFYTILIPLLNPIIYTLRNKDIMVALRKLQTKLSTYGNT

SEQ ID NO: 1394 - protein, 312 aa, Mus musculus
MTFENFTMLTEFVFLGLSGRQDVQQGLFALFFLVYGITVIANLGMVILIKLDSRLHTPMYYFLSNLSFCDICYSSTVSPKMLADFLSKEKRIPYNLCAVQMYFFGAFADVECLMLAVMAYDRYVAICNPLLYTIVMSKKLCIQLVAVAYAIGLVDSAIHTSCTFRLSFCNSNVINHFFCDIPPLLALSCSDTSINEIVMFTFIGCVVGISIVTVLLSYCYIIATICRMNSAEGRHKAFSTCASHLMAVAIFHGTLLFMYFRPSSSYSMDTDKMASVFYTVVIPMLNPLIYSLRNKDVKGALKKAININLWPG

SEQ ID NO: 1395 - protein, 314 aa, Mus musculus
MEHSENSAMDNATSVTQFLLLGFSGVPNLQTFLFGMFSIMYVVILIGNTSILVIARIDPALQKPMYYFLANFSFLEICYVSVTLPRILYNLWTQDRGICLLACAIQMFFFLILAATECFLLAVMSYDRYVAICNPLHYPLVMNPTKCTQLAVGSWLGGIPVQIGQTCRIFSLHFCNSNIIEHFFCDVPPILKLACGDTSMHELSVYLVAMFFVASPFMLILASYSKIIATILKLPTATGRAKAFSTCSSHLVVVLLFFGSATINYLRPKSIHSVGTDELLSLFYTIVTPMFNPLIYSLRNKDVIAALRRLLLKI

SEQ ID NO: 1396 - protein, 318 aa, Mus musculus
MNHQQKPQEGNLTNLKEFVLLGFSDVPDLQWVLFGLLIAMYCFILLGNGTIVLITNVDSALQTPMYFFLGNFSFLEICYVSITLPRMVFNLGTQRRTISFIACATQMCFTLILGATECFLLAVMAYDRYVAICNPLHYPLVMNQKVCSQLVIGSWISGIPIQIGQTSHIFSLSFCGSNQINHFFCDIPPILHLACGDIFINEMMVFLGAFLFVLFPFMLIVFSYSKIISTVLKLSSTKSRAKAFSTCSSHLAVVILFFGSAMITYFRSNASHSGETDKVLSLFYTVVTPMFNPMVYSLRNKDVTIALRKFLCKQFVKI

SEQ ID NO: 1397 - protein, 317 aa, Mus musculus
MEGDNTSSTDFTFMGLFNTEETSGLVFATISVIFLTALVANGIMIFLIHTDAHLHTPMYFLLSHLSFIDMMYISTIVPKMLVDYLLGQRTISFVGCTAQHFLYLTLVGAEFFLLGLMAYDRYVAICNPLRYPVLMSRRICWIIIAGSWFGGSLDGFLLTPITMSFPFCRSREINHFFCEAPAVLKLACADTALYETVMYVCCVLMLLIPFSVVISSYARILATVYHMSSVEGRKKAFATCSSHMTVVTLFYGAAIYTYMVPHSYHSPSQDKIFSVFYTILTPMLNPLIYSMRNKDVSGGLRRALGKIRSSQRVSKDY

SEQ ID NO: 1398 - protein, 309 aa, Mus musculus
MAINNSTTVVEFVLQGLSEDPGLQALFLAFFLLLYILALAGNTLIIIAISLNPRLHTPMYFFLANLALLDIICTSTVVPKLLEGLVGKSSHISYKGCMTQVFFLIWVLGAELLLLTAMAYDRYVAICRPLHYNTLMSWPICVLLAGFVWVIGIANTSVHIGLLVRLNFCGSNQIRHFLCEVPTLLLLSCSPTTLNNIMLVIADVYFGVLNFLLTMISYSFIISSILRIRSAEGKKRAFSTCSAHLVVVTLYYSTIIYTYLQPGSGSSFQNSKVVTLLYTAVSPTLNPIIYSLRNKDVKVALKRLFPCFH

SEQ ID NO: 1399 - protein, 311 aa, Mus musculus
MIKNNQTLFNQFLLLGLPIPAEHQQLFFALFLSMYLTTILGNLIIIILIRLDSHLHTPMYLFLSNLSFSDLCFSSVTMPKLLQNMQSQDTSITYAGCLTQMYFFVLFGGLEIFLLVVMAYDRYVAICLPLHYTSIMSLKLCVCLVLLSWVISILNSMLHTLLLARLSFCEDNMIRHFFCDMSALLKLACSDIYINELMIFILGGPLMVIPFLLIVMSYVQIIFSILKASSTRAIYKVFSTCGSHLTVVSLFYGTIIGLYLCPSANNFTAKEASIAIMYTVVTPMLNPFIYSLRNRDIKEALINVLIKKIPL

SEQ ID NO: 1400 - protein, 314 aa, Mus musculus
MTRRNQTVISQFLLLGLPIPPEHQQLYYALLLSMYLTTVLGNLIIIILILLDSHLHTPMYLFLSNLSFADLCFSSVTMPKLLQNMQSKVPSIPYAGCLAQIYFFLYFGDLGNFLLVAMAYDRYVAICFPLHYMSIMSPRLCVSLVLLSWVLTTFHAMLHTLLMARLSFCEDNVIPHYFCDMSTLLKVACSDTHDNELAIFILGGPIVVLPFLLIIVSYARIVSSIFKFPSFQGIRKAFSTCGSHLSVVSLFYGTVIGLYLCPSANNTYVKETIMSLMYTMVTPMLNPFIYSLSNRDIKDALEKIMCKRQIPFFL

SEQ ID NO: 1401 - protein, 312 aa, Mus musculus
MIKNNQTVISQFLLLGLPIPPEHQHLFYALFLAMYLTTVLGNLIIIILIILDFHLHTPIYLFLSNLSFSDLCFSSVTMPKLLQNMQSQDTTISYVGCLTQMYFPNVFANLENFLLMFMAYDRYVAICYPLRYTSIMSPILCVCMVFMSWLLTMLNSTLHTVLIVKLSFCEDNVIPHFFCDISAVLKLACSDIYINELTIFITGAFIIVIPFLLIVVSYVQIVCSILKFSSTRGIAKIFSTCGSHLSVVSLFYGTIIGLYLCPSTNNSTVKDTAMAMMYTVVTPMLNPFIYSLRNKDMKEALIRVLCKKEISL

SEQ ID NO: 1402 - protein, 311 aa, Mus musculus
MIMNNKTVITQFILLGLPILPEYQHLFYALFLSMYLTTILGNLIIIILIQLDSHLHTPIYLFLSNLSFSDLCFSSVTMPKLLLNMQSQDTSIPYAGCLTQMYFSNLFGSLEIFLLVIMAYDRYAAICLPLHYTSIMSPKLCVCLVLLSWVISMLYSMLHTLLLARLSFCEDNVIPHFFCDISALLKLACSDIHINELMIFFLGGPLTVIPFLLIVVSYIQIVFSILKISSTRAIHKVFSTCGSHLSVVSLFYGTIIGLYLCPSANNFSVKKASITMMYTVVTPMLNPFIYSLRNRDIKEALVRVLIKKISL

SEQ ID NO: 1403 - protein, 315 aa, Mus musculus
MDTYNLTVLKYFILTGITDLPELQAPLFGLFLIIYMISVVGNLGLIILTKIDSRLQTPMYFFLRQLSLTDLGYSTAVGPKMLINFVADQPTISYNWCSVQLTFFSIFITTEVFILSAMAYDRYVAICHPLLYTIIMSQRLCHVLVAIPYLYSVFISLWTIIKIFTSSFCGHNIIRYFYCDSLPLILMLCSDTHEIKLIILIFATFNLISSLLVVSISYILILVSILRMNSSEGRHKAFSTCGSHLTVIVIFYGTLFFMYAQPKSIHSFETGQVASLFYTLVIPMLNPMIYSLRNQEVKQALNRKWKMCVNILFKL

SEQ ID NO: 1404 - protein, 313 aa, Mus musculus
MEKYNLTIVTEFILVGITNHHEFQVPLFGLYLIIYLTSLVDNLGMIILTIVDSRLQTPMYFFLRHLATTDLGYSTAVGPKMLRNFLVDQNIISFYACAIQSSFFGMFIVCEFFILSAMSYDRYVAICKPLLYTVIMSQKACWILVTIPYLYSIIVSLLVNIKIFTLSFCGYNVISHFYCDALPLLTLACSNTHEIEAIILIFSAFNLLSSLLIVIGSYLLILMAILRINSTEGKWKAFSTCGSHLTVVIVFYGTLICMYLQPTSTHSIDTGKGTSIFYTQVIPMLNPLIYSLRNKDVTDVLKKTKEKVYNLVS

SEQ ID NO: 1405 - protein, 312 aa, Mus musculus
MEKRNLTVVTEFILMGITDRPELQAPLFGLFLIIYLISLLGNMGMIILTMVDSRLQTPMYFFLRHLAITDLGYSTAVGPKMLENFVVNQNTISNHLCAIQLTFFLVFIICELFILSAMSYDRYVAICKPLLYTVIMSHRVCWVLVAVPYFYSVIISLLITIKIFALPFCDYRIVSHFCDSLPLISLLCSNTHDIEIIILISAGFNLVSSLVVLLFSYLLILIAIFRMNSAEGRQKALSTCGSHLTVVIVFYGTLIFMYVQPKSSHSFDTDKVASIFYTLIIPMLNPLIYSLRNKDVKYALERLWKMLGNIFS

SEQ ID NO: 1406 - protein, 313 aa, Mus musculus
MENQNLSVLNEFILVGITDRPELQAPFFVLFFLIYVASVVGNLGMIVLTKLDERLQTPMYFFLRHLAFIDFGYSTAVGPKTLVSFVTNKNTIPYNWCAFQLSLFIFFIISELFVLSAMAYDRYVAICNPLLYTVIMSQKVCWVLVTIPYLFSAFLSLITTIKIFISSFCGYNVISHFYCDSLPLLTLICSGTRDVELIILIFSAFNLISSLSVVLVSYTFILVAILRMNSAEGRHKAFSTCGSHLTVVVILYGTLSFMYIQPKSSHSFENDKMASVFYTLVIPVLNPIIYSLRNKEVKGALQKLWKNVCKVCI

SEQ ID NO: 1407 - protein, 315 aa, Mus musculus
MAPRNLSHVTEFILVGVSDLPELQVPLFFVFLVIYLLTAAGNLGIITLTSVDSRLQTPMYFFLRHLAVINFGNSTVIAPKMLVNFLVSKKTTLYYECATQLGGFLVFIVAEIFMLAVMAYDRYVAICNPLLYMVVVSRRVCLLLVSLTYFYGFCTAIVVSSCVFSVSYCSSKKINHFYCDNVPLLALSCSDTYLPETVVFISAATNLFFSMSIVLVSYFNIVLSILRIRSAEGRKKAFSTCASHMMAVTVFYGTLLFMYLQPQTNHSLDTDKMASVFYTLVIPMLNPMIYSLRNKDVKAALKRFMTNPCDSFKSL

SEQ ID NO: 1408 - protein, 308 aa, Mus musculus
MGQPNITMPTEFILMGVTQTAELKLPLFAVFLTIYAITVVGNLGMIILTKLDSRLQTPMYFFIRHLAFIDLGNSTAICPKMLVNFVVDKNNITYYACATQMACFILFIVSEFSILSSMAYDRYVAICNPLLYSAIMSQRRCQVLIGIPYLYSIFQALLFPIRYFTLSFCGANVISHFYCDVVPLLPLICSHVEETELLTILFSAFNLISSLLVVLLSYMLILLTIFRMRSAEGRKKAFSTCGSHLTVVVVFYGSLLFMYVQPKSAHSFEYDKAASVFYTLVIPMLNPLIYSLRNKEVKNAFHRVFKNL

SEQ ID NO: 1409 - protein, 310 aa, Mus musculus
MDKENHSVVTEFVFMGITQDPQLQIIFFVVFLLVYLVNVIGNVGMIILIITDSQLHTPMYFFLCNLSFVDLGYSSAIAPRMLADFLTKHKVISFSSCATQFAFFVGFVDAECYVLAAMAYDRFVAICRPLHYSTLMSKKVCLVLMLGSYFAGLVSLVAHTSLTFSLSYCGSNIINHFFCEIPPLLALSCSDTYISEILLFSLCGFIEFSTILIIFISYAFILIAIIRIRSAEGRLKAFSTCGSHLTGVTLFYGTVMFMYLRPTSSYSLDQDKWASVFYTIIIPMLNPLIYSLRNKDVKAAFKKLIGKKPQ

SEQ ID NO: 1410 - protein, 320 aa, Mus musculus
MSFQKVEMSHRNSTVPDEFILTRITHRPELQLLLLGVFIVIYGVAMIGNMSMIILTKLDSRLHTPMYYFIRHLAFIDLGNCTVIYPKMMVNFVVEQNVISYYACAVQMAFYIAFIISELFILSAMAYDRYVAICNPLLYSAIMSQRRCHVLVGIPYLYSVFQAVMITSKIFTLTFCDSNVISHFYCDNVPMLLLLCSNARDIELLIILFSALNLISSLFVVLVSYLLILLAIYRMHSADGRKKAFSTCGSHLTVVVVFYGTLLFMYLQPKSTHSFETDKIASVFYTLVIPMLNPLIYSFRNKEVKNAVLRVFRYQCKLCT

SEQ ID NO: 1411 - protein, 319 aa, Mus musculus
MAEVNISYVSEFILKGITDRPELQAPCFVMFLTIYLVTVLGNLGLIVIIRVDSRLHTPMYFFLSHLAFVDLCYSSAITPKMMVNFVVERNTIPFHACATQLGCFLTFMITECFLLASMAYDRYVAICSPLHYSTLMSKRVCIQLVAVPYVYSFLVALFHTIITFRLTYCGPNVINHFYCDDLPLLALSCSDTHMKEILIFAFAGFDMICSSSIVLTSYLFIIAAILRIRSTQGRRKAISTCGSHMVAVTIFYGTLIFMYLQPKSNHSLDTDKMASVFYTVVIPMLNPLIYSLRNKEVKDASKKALDKGYETLKILRLSK

SEQ ID NO: 1412 - protein, 319 aa, Mus musculus
MGRHNLTVVTEFVLMGITDRPELQAPLFGLFLIIYLISLIGNLGMIILTTVDSKLQTPMYFFLKHLAITDLGYSTSVGPKMLVNFVVDQNTISFKLCATQLSFFLVFIVSELFILSAMSYDRYVAICKPLLYTVIMSQKLCWVLVAIPYLYCTFVSLLVTVKIFTLSFCGYNVISHFYCDSLPLLPLLCSDTHDIELIILILAAFDLISSLLVVLVSYLLILIAIVRMNSAEGRRKAFSTCGSHLTVVIVFYGTLIFMYVQPNSSHSFETDKVASIFYTLVIPMLNPLIYSLRNKDVKYALKRTLNNLCKLFSLAFHKI

SEQ ID NO: 1413 - protein, 314 aa, Mus musculus
MAQINCTQVTEFILVGLTDREELKMPLFVVFLSIYLFTTLGNLGLILVIRTDARLHTPMYFFLSNLAFVDFCYSSVITPKMLGNFLYKQNMISFNACAAQLGCFLAFMTAECLLLASMAYDRYVAICNPLLYMVLMSPGICFQLVAAPYSYSFLVALFHAILTFRLCYCHSNAINHFYCDDMPLLRLTCSDTHSKQLWIFVCAGIMFISSLLIVFISYTFIISAILRMRSAEGRRKAFSTCGSHMLAVTIFYGTLIFMYLQPSSNHSLDTDKMASVFYTVIIPMLNPLIYSLRNKEVKDALKKLIASKNQMLSS

SEQ ID NO: 1414 - protein, 312 aa, Mus musculus
MATENCTVVTEFILLGLTDRAELKMMLFVLFLVIYAVTLLGNLGMILLIRITPKLHTPMYFFLSCLSFVDACYSSVIAPKMLISFLVVTETISFSACIMQHLFFGVLVTTEGFLLSVMAYDRYVAVVNPLLYTVSMSKQKCIMMVTGSVIGGTINSLTHTISLSKLSFCGPNIVGHFFCDIPSLLILSCSDTSMNEFLLLIFSGVIAIGTLLIVFISYLFIALAILRIRSASGRQKAFSTCASHLTAVTIFYGTLSFNYIQPSSQYSVEQEKVVSVFYTLVIPMLNPMIYSLRNKEVKEAAKRAIEMKSFSC

SEQ ID NO: 1415 - protein, 301 aa, Mus musculus
MIINNQTAIPQFILLGLPILPEQQQMFYALFLAMYLTTVLGNLIIIILIRLDSHLHTPMYLFLSNLSFSDLCFSSVTMPKLLQNIQSQDPSISYAGCLTQMYFFMVFANTENVLLVVMAYDRYVAICFPLHYTSIMSPKLCVSLVVLTWVFTVLYSMLHTLLLARLSFCEDNVIPHFFCDISVLLKLACSDTYINELMIFILGGLDIVIPFILIVVSYVQIVCSILKFSSTRGIAKVFSTCGSHLSVVSLFYGTIIGVYICPSANNSTVKEIVMALMYTVVTPMLNPFIYSLRNRDMKEAL

SEQ ID NO: 1416 - protein, 312 aa, Mus musculus
MTGNNQTLISKFLLLGLPILSEYHFLFYALFLAMYLTTILGNLLIIALVRLDSHLHTPMYLFLSNLSFSDLCFSSVTIPKLLQNMQSQVPSISYVGCLTQLYFFMVFGDMESFLLVVMAYDHYVAICFPLHYTSIMSTKFCTSLVLLLWMLTTSNAMMHTLLMARLSFCEKNVILHFFCDISALLKLSCSDTFVNELMIFIMGGIIIIIPFLLIVMSYVRIFFSILKVPSTQGIHKVFSTCGSHLSVVSLFYGTIIGLYLCPSSNNSTVKESAMAMMYTVVTPMLNPFIYSLRNRDMKRALIRVICSKKISL

SEQ ID NO: 1417 - protein, 312 aa, Mus musculus
MKMNNKTVITQFLLLGLPISLEYKHLFYALFLAMYLTTVLGNLLIIVLIKLDSHLHTPMYLFLSNLSFSDLCFSSVTMPKMLHNMQSQDPSIPYGGCLAQIYFLMAFGDMESFLLVVMAYDRYVAICFPLHYTSIMSPKLCTCLMLLLWILTTSHAMMHTLLAARLSFCENNVILNFFCDLFAVLKLSCSDTYINDLMILIFGGLIFIIPFLLIVISYARIISSILKVPSTQGIYKVFSTCGSHLSVVSLFYGTIIGLYLCPSGNNSTVKEIAMAMMYTVVTPMLNPFIYSLRNRDMKKALIRVICSKKISL

SEQ ID NO: 1418 - protein, 310 aa, Mus musculus
MNNKTVITQFLLLGLPIPPEYQHLFYALFLAMYLTTILGNLLIIVLIQLDSHLHTPMYLFLSNLSFSDLCFSSVTMPKLLQNMQSQDPSIPYGGCLAQIFFFMLFGDMESFLLVAMAYDRYVAICFPLHYTSIMSPKVCTFLVLLLWILTTSHATMQILLTVRLSFCENNVLLNFFCDIFVLLKLACSDTYVNDLMILIMGGLIIVIPFLLIVISYARIISSTLKVPSTQGIHKVFSTCGSHLSVVSLFYGTIIGLYLCPSGNNFSLKGSAMAMMYTVVTPMLNPFIYSLRNRDMKRALIRIIGSKKISL

SEQ ID NO: 1419 - protein, 312 aa, Mus musculus
MAGNNQTFILEFLFLGLPIPSEYQLLFNALFLAMYLTTLLGNLLIILLVQLDSHLHMPMYLFLSNLSFSDLCFSSVTIPKLLQNMHSQVPTISYADCLTQLYFFLVFGDMESFLLVAMAYDRYVAICFPLHYTSIMSTKLCVSLVLLLWMLTIFHALLHTLLTARLSFCEKNVILHFFCDLPALLKLSCSDTFVNELMIFILGGIISIIPFLLIGMSYVRIFFSILKVPSTQGIHKVFSTCGSHLSVVSLFYGTIIGLYLCPSSNNSTLKKTAMALMYTLVTPMLNPFIYSLRNRDIKRALIRVISSKKISL

SEQ ID NO: 1420 - protein, 312 aa, Mus musculus
MAGKNQTLILEFLLLGLPISSEYHLLFYALLLAMYLTTLLGNLLIILLVRLDSHLHTPMYLFLSNLSFSDLCFSSVTIPKLLQNMQSQVPTISYADCLTQLYFFMVFGDMESFLLVVMAYDRYVAICFPLHYTSIMSTKFCALLVLLLWMLTISHALLHTLLMARLSFCEKNVILHFFCDISALLKLSCSDTYVNELMIFIMGGIISIIPFLLIVMSYVRIFFSILKVPSSQDIHKVFSTCGSHLSVVTLFYGTIIGLYLCPSGNNSTVNEISMAMMYTVVTPMLNPFIYRLRNRDMKRALIRVIFSKKISL

SEQ ID NO: 1421 - protein, 311 aa, Mus musculus
MDLGTLGNDSCVSTFVLLGLTETPVLRPILFVIFLLAYVATLGGNFSILAAIIIEPKLHTPMYFFLGNLSMLDVGCISVTVPAMLKHFLSNDRHIPYGACLSQLFFFHLLAGADCFLLTVMAYDRYLAICHPLTYNTHMSWRIQKASVCLSCVFSFSNALTQTVALSTLKFCGPNTINHFYCDLPQLFQLSCSSIQLNEQLLFVAAAFMGVVPLVLITVSYGHVAAAVLRIRSAEGRKKAFSTCSSHLTVVGIFYGTGVFSYMRLGSVESSDKDKGIGILNTVISPMLNPLIYSLRNPDVQGALWKVLTGR

SEQ ID NO: 1422 - protein, 315 aa, Mus musculus
MEPGAWGNRTAVTDFILLGLTGNVRLQPILFVVFFFAYIVTVGGNLSILAAIFVEPKLHTPMYYFLGNLSLLDIGCISVTVPPMLVCLLAHECRVPYAACISQLFFFHLLAGVDCHLLTAMAYDRYLAICQPLTYSTRMSREVQGTLVGICCTVSFINALTHTVAVSVLDFCGPNVVNHFYCDLPPLFQLSCSSIYLNGQLLFVGATFMGVVPMILISVSYAHVAAAVLRIRSTEGRKKAFSTCGSHLTVVCIFYGTGFFSYMRLGSVSASDKDKGIGILNTILSPMLNPLIYSLRNPDVQGALKRVLTGKRYPV

SEQ ID NO: 1423 - protein, 308 aa, Mus musculus
MTEDNYSLTTEFILIGFSDHPDLKILLFLVFSTIYLVTMVGNLGLVALIYMEPRLHTPMYIFLGNLALMDSCCSCAITPKMLENFFSVNKRISLYECMAQFYFLCLAETADCFLLAAMAYDRYVAICNPLQYHTMMSKKLCLQMTTGAYIAGNLHSMIHIGFLFRLTFCRSHVIKHFFCDVLPLYRLSCVDPYINELMILIFSGSVQTFSIIIVLISYFCIIFTIFTMKSREGRSKALSTCASHFLSVSIFYGSLLYTYIRPSSINEGNEDIPVAIFYTLVIPLLNPFIYSLRNKEVINAIKRTMNKG

SEQ ID NO: 1424 - protein, 309 aa, Mus musculus
MLEGNHTMKHEFILTGFTKHPEMKGLLFAVFFFIYLITMIGNMGLVILICTERSLHTPMYIFLGNLAFIDSCCACAITPKMLENFFSEDRIISLYECMAQFYFLSTVETADCFLLSAMAYDRYVAICNPLQYHTMMSKKLCLQMITGAFIVGNLHSMVHVGLLFRLAFCGSNQINHFYCDILPLYRLSCVDPYVNELVLLVFSAPIQVFTISCVLISYLFIVYTIFQMKSKEGRIKAFSTCASHFLSVSLFYGSLFFIYIKPNLLEEGDKDMPAAILFTIVVPLLNPFIYSLRNKEVKNVLQKILQKNK

SEQ ID NO: 1425 - protein, 321 aa, Mus musculus
MVEENHTMKREFVLTGFTDHPEMKGLLFAVFFFIYLITMIGNMGLVILISKERSLHTPMYIFLGNLAFIDSCCACAITPKMLENFFSEDRIISLYECMAQFYFLCTVETADCFLLSAMAYDRYVAICNPLQYHTTMSKKLCLQMTTGAFIAGNLHSMVHVGLLFRLAFCGSNQINHFYCDILPLYRLSCVDPYINELVLFVFSGSIQVFTIGCVLISYLFIVYTIFQMKSKEGRIKAFSTCASHFLSVSLFYGSLLFMYIRPNLLEEGDKDMPAAILFTIVVPLLNPFIYSLRNKEVKNVLQKILQKKIISKNFKQASIIV

SEQ ID NO: 1426 - protein, 317 aa, Mus musculus
MMKANHSLTVEFILIGFSDHTDLKTLLFLLFSAIYLVTIVGNLGLVALIYMEPRLHTPMYIFLGNLALMDSCCSCAITPKMLENFFSVDRRISLYECMVQFYFLCLAETADCFLLAAMAYDRYVAICNPLQYHSMMSKKLSIQMSIGTFIASNLHSLIHTGCLLRLNFCKSRRIDHFFCDILPLYKLSCTDPFINELMLYIFSMPIQVFTITTVLVSYSCILLTVFKMKSKDGRGKTFSTCASHFFSVSIFYICLLMYIGPSKNSNKDIPVDVFYTIVIPLLNPFIYSLRNKEVVNAVKKVMKTHSIFKNSSASIAH

SEQ ID NO: 1427 - protein, 308 aa, Mus musculus
MAENNYSVTNEFILVGFSDHPDLKTPLFLVFSAIYLVTMVGNLGLVALIYMEPRLHTPMYIFLGNLALMDSCCSCAITPKMLENFFSVDRRISLYECMVQFYFLCLAETTDCFLLAAMAYDRYVAICNPLQYHSMMSKKLCLQMTMGSYIAGNLHPMIEVGLLLRLTFCRSHVIKHFFCDVLPLYRISCTDPNINELILLVLAGSIQVFTISIVLVSYSCILFTIFTMKSKEGRGKALSTCASHFLSVSIFYGSLLFMYAQPHSANEGDKDMPVAIFYTLIIPLLNPFIYSLRNKEVINVMKKTMKRR

SEQ ID NO: 1428 - protein, 319 aa, Mus musculus
MRLEKTNHSLTTQFILVGFSDHPDLKTPLFLLFSVIYLVTMVGNLGLVALIYMEPRLHTPMYIFLGNLALMDSCCSCAITPKMLENFFSVDRKISLYECMAQFYFLCLAETSDCFLLAAMAYDRYVAICNPLQYHSMMTKKLSIQMSIGTFIASNLISILHVGCLLRLTFCKSNRIDHFFCDILPLYRLSCTDPFINELMIYIFSMPIQFLTITTVLVSYFCILLTIFKMKSKDGRGKALSTCASHFFSVSIFYACLLMYIRPFDDSNKDIPVAIFYTIIIPLLNPFIYSLRNTEVVNAVKKVMKIYTIFKRSSASAAH

SEQ ID NO: 1429 - protein, 309 aa, Mus musculus
MTEDNYSLATEFILIGFSDHPDLKTLLFLVFSAIYLVTMVGNLGLVTLIYIEPRLHTPMYIFLGNLALMDSCCSCAITPKMLENFFSVDRRISLYECMAQFYFLCLAETTDCFLLAAMAYDRYVAICNPLQYHSMMSKKLCLQMTTGAYIAGNLHSMIHIGFLFRLTFCRSHVIKHFFCDVLPLYRLSCVDPYINELMILIFSGSLQTFTITIVLISYFCILFTIFTMKSREGRRKALSTCASHFLSVSIFYGSLLYMYIRPSSLNEGYKDIPVAIFYTLVIPLLNPFIYSLRNKEVINVMKRAMKKRL

SEQ ID NO: 1430 - protein, 307 aa, Mus musculus
MAERNWTLVTEFVLTGLTERPELQVPLFLVFLIIYLTTMVGNLGLIALIWKDPHLHTPMYVFLSSLAFADVCTSSSVTPRMLVNFLSTDHEISLVECFTQFYFFCSSATTECFLLLVMAYDRYVAICNPLLYPVVMSNKLCTQFIVVTYFIGVLNSTIHVGLLIRLTFCRSNVIDYFYCEIVKLLTISCTDPSINMLVVFICSIFIQASTLANIVVSYTRVLFAILRKKSEKGRSKAFSTCSAHLLSVSLFYGTLFLIYILPGSEPAEDKEQLLSIVYTIIIPLLNPFIYSLRNKEVLGALRRLIKK

SEQ ID NO: 1431 - protein, 308 aa, Mus musculus
MAEGNRTLVTEFILMGLTDHPTLKAALFPLFLVIYLITMVGNLGLIALIWKDSHLHTPMYLFLSSLAFADSCTTSSVTPRMILNFLSTNHEITLVECFAQFYFMGSSATTECFLLSVMAYDRYLAICNPLLYPVLMSNRLCTQFIAVAYLLGALHLAIHVGLLLRLTFCRSNIIQYYYCEILQLFNISCIDPTINVFVLLILATSIQVFTFVTVLVSYIRVLFAILRKKSDKGRSKAFSTCSAHLLSVSLFYGTLFLIYVCPGSGPVGDKEKMLSLFYTVIIPLLNPFVYSLRNKEVISAFRRVMKNT

SEQ ID NO: 1432 - protein, 318 aa, Mus musculus
MTEDNYSLATEFILTGFSDYPDLKILLFLVFSAIYLVTMVGNLGLVALIYMESRLHTPMYIFLGNLALMDSCCSCAITPKMLENFFSVDRRISLYECMAQFYFLCLAETADCFLLAAMADDRYVAICNPLQYHTMMSKKLCLQMTTGAYIAGNIHSMIQIGFLFRLTFCRSHVIKHFFCDVLPLYRLSCVDPYINELMILIFSGIAQTFTITIVLISYFCILFTIFTMKSREGRRKALSTCASHFLSVSIFYGSLLYMYIRPSSLNEGYKDIPVAICYTLIIPLLNPFIYSLRNKEVINVMKEQCRDNCNILKSFFEN

SEQ ID NO: 1433 - protein, 305 aa, Mus musculus
MEKNSTLMTEFVLRGITDRPELQVPLFLVFFFIYVTTMVGNLGLIFLIWKDPHLHTPMYLFLGNLAFADACTSSSVTPKMLMKFLNKNDIISRGECFAQFYFFCFSATTEIFLLVAMAYDRYVAICNPLLYLVVMSKRLCTVLISLSYIIGVLNPIVHVGLLFRLTFCKSNVIDHFYCEIMPLYAISCTDPSLNGLVAFIFASSIQISTSVTIVVSYARVLFAVLNMKSERGRRKAFFTCSAHLLSVSLFYGTLLFMYVSPGSGSGKQKDKMYSLFYTVVIPLLNPFIYSLRNKEVLGALKKLIK

SEQ ID NO: 1434 - protein, 306 aa, Mus musculus
MEKNSTLLTEFVLRGITDRSELQVPLLLVFFLIYVTTMVGNLGLIFLIWKDPHLHTPMYLFLGNLAFADACISTTVTPKMLMKFLNKNDMISVGECFAQYYFFCISATTEIFLLVAMAYDRYVAICNPLLYLVVMSKRLCTVLISISYIIGFVNCGLNIGLLFRLTFCKSNIIDHFYCEILQLYTISCTDPSLNTLVVFICASSIQISTSVTIIVSYARVLFAVLNMKSERGRRKAFFTCSAHLLSVSLFYGTLLFMYVSPGSGSGKQKDKIYSLFYTVVIPLLNPFIYSLRNKEVLGALKKFIKC

SEQ ID NO: 1435 - protein, 315 aa, Mus musculus
MLTGKSVLNQSGTTEFVFRVFTTVPEFQALLFLLFLLLYLMILCGNAAIIWVVCTHSALHTPMYFFLSSLSVLEIFYTTDVVPLMLSNIFGAQKPISLAGCGTQMFFFVTLGSTDCFLLAVMAYDRYVAICHPLHYSLIMTKKLCVQMVMGSWSLALFLSLQLTALIFTLPFCGHDQEINHFLCDVPPVLRLACADIHVHQAVLYVVGILVLTVPFLLICISYVFIASTILRMRSAEGRQRAFSTCSSHLTVVLLQYGCCSLVYLRPRSSTSEDEDRQIALVYTFVTPLLNPLIYTLRNKDVKGALKNSIFHKAV

SEQ ID NO: 1436 - protein, 317 aa, Mus musculus
MNMDQGNQTSISEFILLGLSNQAEKQKLIFVIFLSMYLVTVIGNSLIILAIGLDIHLHTPMYLFLANLSFADISSSSTSVPKMLMNIQTNSQSISYEGCITQMYFSIVFVVIDNFLLGVMAYDRYVAICHPLNYTNIMHPRFCLLLSFCPWALSNIVALTHTLLANQLIFCNHNTIQHFFCDLAPLIKLSCSDAMINELVKFVVGLSVITFPFALILFSYVCIIRDVLRISSTEGKWKAFSTCGSHLTIVFLFYGTIVGVYFFPSSTHPEDTDKIGAVLFTVVTPMLNPFIYSLRNKDMKGALRKLINKSHLLPLMS

SEQ ID NO: 1437 - protein, 310 aa, Mus musculus
MGGNQTLITQFILLGFPLSPRMQMLLFALFSLFYAFTLLGNGTILGLICLDSRLHTPMYFFLSHLAIVDIAYACNTVPQMLVNLMDPAKPISFAGCMTQTFLFLTFAHTECLLLVVMSYDRYVAICHPLRYTAIMSWRVCVILVLTSWILGVLLALVHLVLLLPLPFCGSQKVNHFFCEIIAVLKLACSDTRINELMVLAGAVSVLVGPFSSIVVSYAHILCAILKIKSQQGRQKAFSTCSSHLCVVGLFYGTAIVMYIGPQHGKSNEQKKYLLLFHSLFNPMLNPLIYSLRNKEVKSALKRTLLKEDTS

SEQ ID NO: 1438 - protein, 313 aa, Mus musculus
MKRDNATWVSEFILMGLSSDKHIQAGLFVLFGVIYLLTLLGNGLIVLLIALDPRLHLPMYFFLCHLSVVDICYTSSGVPQMLAHFLMEKKTISFALCGTQLFFALTLGGTEFLLLAAMAYDRYVAVCNPLRYTVVMNPRLCMGLAGVSWFVGVVNSAVETAVTMSLPTCGHNVLNHVACETLALVRLACVDITLNQVVILASSVVVLLVPCSLVSLSYAHIVAAIMKIRSTQGRRKAFETCASHLTVVSMSYGMALFTYMQPRSTASAEQDKLVVLFYAVVTPMLNPLIYSLRNKDVKAAFSRVLMKNIESKN

SEQ ID NO: 1439 - protein, 317 aa, Mus musculus
METNNETQLHEFILLGLSSDWDSQVSLFVLFLLMYLVTVLGNFLIIVLIRLDSRLHTPMYFFLTNLSLVDASYATSIVPQLLAHFLATHKAIPFLSCAAQLFFSLGLGGIEFLLLAVMAYDRYVAVCDPLRYSVIMHAGLCTRLVITSWVSGSINSLVHTAITFQLPMCTNKYIDHIACETLAVVRLACVDTSSNKIAIMVSSIVLLMTPFFLVLLSYIQIISTILKIQSTEGRWKAFHTCASHLTMVVLCYGMAIFTYIQPHSSPSVLQEKLMSLFYAILTPMLNPMIYSLRNKEVKGAWQKLLGKFSGFASKLAT

SEQ ID NO: 1440 - protein, 304 aa, Mus musculus
MARENNVTELIITGLFQDPNVQKVCFVLFLPVYLATVLGNGLIVAMVIVSKSLHSPMYIFLSSLSLVEICYSSTVVPKFITDLLAKVKTISLKGCLAQIFFFHFLGVAEIFLLVVMAYDRYVAICKPLHYMNIMSRQVCHVLVAVSWLGGFLHSIIQVLISIQLPFCGPNVIDHYFCDLQPLFKLACTDTFVESVIVMANSGLIALCSFLVLVSSYVIILVNLRKHSAEGRRKALSTCASHITVVVLFFGPAIFLYMRPSSTFTEDKLVAVFYTVITPMLNPIIYTLRNAEVKNAVRKLWGKRI

SEQ ID NO: 1441 - protein, 305 aa, Mus musculus
MANKNNVTELIFTGLFQDPEVQKVCFVLFLPVYLATLLGNSLILVAVSISKTLHSPMYFFLSSLSLVEICYSSTIVPKFITDLLAKVKTISLKGCLTQIFFSHFFGVVEVILLVVMAYDRYVAICKPLHYMNIMSRQVCHMLVAGSWLGGFIHSIIQIIITIPLPFCGPNVIDHYFCDLQQLFKLACTDTFMEGFIVMANSGLISIVSLFILVSSYAVILISLRKRSAEGRRKALSTCASHITVVILFFVPGAFIYMRPSSTFTEDKLVSVFYTVITPMLNPIVYTLRNTEMKNAIRMSWKQKDS

SEQ ID NO: 1442 - protein, 306 aa, Mus musculus
MEPRNNVTYFVLLGLSENPKVQKGLFVLFLLSYVLTMVGNLLIVMTVTTSNSLGSPMYFFLASLSFVDIIYSSAISPKLISDLFFGQNTISFKFCMTQLFTEHFFGGSEVFLLLVMAYDRYVAICKPLHYSTIMKQWVCVVLLILSWIGGFLHSVIQLSTIYGLPFCGPNIIDHFMCDMYPLLKLVCIDTYVIGLLVMANGGLICTVVFILLLISYGVILYSLKNLNQEGRWKALSTCGSHITVVVSFFVPCIFMYARPAKTFPIDKMLSVFYTVITPMMNPLIYTLRNSEMTNAMKKLWRRKIIS

SEQ ID NO: 1443 - protein, 309 aa, Mus musculus
MENQNNVTEFILLGLTENPKMQKIVFIMFFLIYIISITGNVLIVVTITSTSLLESPMYFFLAYLSFIDACYSSVSTPKLIADSLCEKKTIPFNGCMTQIFGEHLFGGAEIILLTVMAYDRYVAICKPLHYATIMSRRLCSLLVGVSWLGGFLHATIQILFIFQLPFCGPNIIDHFMCDLNPLLNLVCTDTHTLGIFVAANSGFICLLNFLLLLVSYVAILRSLKNHSAEGRRKALSTCISHITVVVLFFVPCIFVYMRPVATLPIDKAVAMFYTMITPMLNPLIYTLRNAQMKDAIKKLGSTKILSSNK

SEQ ID NO: 1444 - protein, 310 aa, Mus musculus
MKQINNVTEFILLGLTQNPDVQKLLLVIFALIYSLTLIGNLLIIVTVISSPTLGSPMYFFLSFLSFVDGCCSSTMAPKMIFDLLAERKTISFNGCMTQIFAEHFFGGVEIILLTAMAYDRYVAICKPLHYMITMNRRVCGFLVSTAWAGGFLHALIQILFMVWLPFCGPNIIDHFICDLFPLLKLSCTDNHIFGLFVAANSGLMCMLIFSILLTSYVLIFCSLKTHSTEEQLKALSTCASHITVVLLFFVPCIFVYLRPMVIFPFDKAVAVFYTVITPMLNPLIYTLRNTEVKNAMRKLWNQRKPGKRFT

SEQ ID NO: 1445 - protein, 308 aa, Mus musculus
MANKNNITELIFTGLFQDPEVQKVCFVLFLPVYLATLLGNSLIVVAVSISKTLHSPMYFFLSSLSLVEICYSSTIVPKFITDLLVKVKTISLKGCLAQIFFSHFLGVAEILLLVVMAYDRYVAICKPLHYMNIMSRQVCHMLVGGSWLGGLIHSIIQIIITIPLPFCGPNVIDHYFCDLQPLFKLACTDTFMEGVVVMANSGLISIISLFILVSSYAIILISLRKHSAEGRRKALSTCASHITVVILFFGPATFLYLRPSSSFTEDKLVAVFYTVITPMLNPIIYTLRNAEVKNAMKKLWGKRNPETE

SEQ ID NO: 1446 - protein, 309 aa, Mus musculus
MAAASNVTEIIFLGLSQYQHVQKVIFVMFLLMYTAIVLGNGLIVVTIVASKGLSSPMYFFLGYLSFVEVCYCSVTAPKLIFDSLLQRKAISLQGCITQIFFLHFFGGTEIFLLTVMAYDRYVAICKPLHYVTIMNRRVCGLLVGAAWSGGLLHSAGQTFLIFQLPFCGPNIINHYFCDVHPVLKLACSDTFLISLLVIINGGSISVISFAVLLASYVVILNSLRSHTAEGRHKALSTCASHLAVVGLFFIPCSFVYMRPCITFPVDKVVAVFYTVVTPLLNPIIYSFRNTEVKNAMKRLVGRKVTWEEK

SEQ ID NO: 1447 - protein, 311 aa, Mus musculus
MEIRSNVTEFVLLGLTRNPSMQKIVFAVFVVIYIISMVGNVLIVVTITASPSLGSPMYFFLAYLSFIDACYSSVNTPKLIIDSLHEKKTILFNGCMTQVFGEHFFGGAEGILLTVMAYDRYVAICKPLHYTTIMSRRVCGLLVGVVWVGGFLHATIQILFIFKLPFCGPNVIDHFMCDLNPLLNLACTDTHILGLFVAANSGFICLLNFLLLLVSYVVILRSLRNHSAEGRRKALSTCVSHITVVVLFFVPCIFVYMRPSATLSIDKAVAVFYTMITPLLNPLIYTLRNAQMKDAIKKLCRWKDDVISINK

SEQ ID NO: 1448 - protein, 310 aa, Mus musculus
MNDTEHMENKRNVTEFILIGLTQNPQMQKVVFVTFLLLYMITISGNLLIVVTIINSQALNSPMYFFLSHLSLIDTIYTSSSAPKLIADSLQENKVISFNGCMAQVYAEHIFGATEIILLTVMAYDRYVAICKPLHYMTIMSHKLCILLVGVAWTGGFLHATIQILFTVWLPFCGPNIIDHFMCDLYPLLELVCMDTHTLGLFVAANSGFICLFNFLLLMGSYVIILRSLKNYSLEGRRKALSTCVSHITVVVLSFIPCIFVYLRPVTTLPIDKAVAVFYTLVAPLLNPLIYTLRNSEVKNAIKKLWRKKI

SEQ ID NO: 1449 - protein, 301 aa, Mus musculus
MNNITEFILVGLTQNMELQIFSFVVFFIVYLLTLAGNLLIMVTISSSKALGSPMYFFLSFLSLIDGCCSSSMTPKMLADSLSVRKTISFSGCMTQVFAEHFFGAAEIILLTVMAYDRYVAICKPLRYTIIMNRFVCGLLVGVAWAGGFIHATIQILFTVWLPFCGPNVIDHFMCDLTPLLKLVCMDTHNLGLFVAANSGFICLLNFLLLMISYIVILDALKSHSKEGRCKALSTCVSHITVVILFFVPCIFVYLRPVITFSIDKAVAVFYTMITPMLNPLIYTLRNTEVKNAMKKLCIKVD

SEQ ID NO: 1450 - protein, 307 aa, Mus musculus
MASVNVTELIITGLFQDPDVQKVCFVLFLPVYLATVLGNGLIVVTISVSKSLNSPMYIFLSSLSIVEICYSSTVVPKFITDLLAKVKTISLKGCLTQIFFFHFLGVAEILLLVVMAYDRYVAICKPLHYMNIMSRQVCHMLVGGSWLGGLIHSIIQIVITIPLPFCGPNVIDHYFCDLQPLFKLACTDTFMEGVVVMANSGLISIISLFILVSSYAIILISLRKHSAEGRRKALSTCASHITVVILFFGPATFLYLRPSSSFTEDKLVAVFYTVITPMLNPIIYTLRNAEVKNAMKKLWGKRNPETE

SEQ ID NO: 1451 - protein, 304 aa, Mus musculus
MSNVTEFILLGLTQDPDLQKLLFIVCLIIYLITLAGNMLISVTIFISPALATPMYFFLSYLSIIDGFYSSSITPKMIYDLISEKSTISFNGCMTQLFAEHFFAAAEIILLISMAYDRYVAICKPLHYMTIMNRHVCIFLVVAAGIVGFVHGMIQTTFIAQLPFCGPNIINHFICDLIPLLELACTDTHTLGPLIAANSGSMCLLIFSMLVASYVVILRSLRNHSAEGRRKALSTCASHVTVVVLFFVPCSYLYVRPVISFHIDKIVSVFYTLVTPLLNPLIYTLRNEEVKRVMKKLLGSNHVKH

SEQ ID NO: 1452 - protein, 314 aa, Mus musculus
MENRNNVTEFILLGLTQNPEGQKVLFVTFLLIYIVTVMGNLLIMVTIMASQSLGSPMYFFLAYLSFIDTVYSTSIAPKMIIDLLYETKTISFRACMTQVFIDHLFAGAEVILLVVMAYDRYVAICKPLHYLTIMNRRVCVLMLLGAWIGGFLHSLIQFIFIYQLPFCGPNIIDSFVCDMYPLLKLACTNTYLIGLCMIANGGAICTVTFLILLVSYGVILHSLKAHSLEGKRKALYTCASHITVVVLFFVPCIFLYARPTSTFPIDKSVTVVLTFITPMLNPLIYTLRNAEMKNAMKRLWSKKSSSIVSGLYHS

SEQ ID NO: 1453 - protein, 305 aa, Mus musculus
MNVTEFILMGLTQNPQLQRILLLMLLIIYIVTVTGNLLIVGTIVCSQTLNSPMYFFLAFLSLIDACYSSSIIPKMLADLMSERKTISFHGCMIQLFVEHFLGASEIVLLVVMAYDRYVAICRPLHYVTRMNHHNCCVLVGVCWIMGFLHSFGQILVTLWIPFCGPNVMDHFCCDIFPLLQLACADTFLLGLLIAANGGVIPVITFTMLLMSYAVILFSLRTHSTAGRKKALSTCSSHITVVVLFFVPCIYTYMRPVTTFHTDKAIAVFYTLVTPMLNPIIYTVRNAEVKNAIRMILKKNSILDNK

SEQ ID NO: 1454 - protein, 323 aa, Mus musculus
MNRFYFNISLKTMQNQSFVTEFILLGLSQNPNVENILCVVFLFIYLATIGGNIMIVVTIIYSPALLSSPMYFFLIFLSLLDACTSSTVTPKMMVDLFYERKTISFECCMTQLFAIHFFTGIEVIILSAMAYDRYVAICKPLHYSSIMTRRLCGILVMVSWTGGFLHSLIQIIFTLQLPFCGPNVIDHYLCDLFPLLKLACTDTHIFVILVFSNSGSISIIIFSILLVSYGVILFSLRAHSSEGRRKALSTCGSHITVVLLFFVPCFLIYARPPSAFSSEKNAFVFATIITPLLNPMVYTFRNKEMKNAIRKMWKKLIVVSHDF

SEQ ID NO: 1455 - protein, 305 aa, Mus musculus
MEQRNNVTEFVLLGLTQSPEGQKILFVVFLVIYVVTMAGNLLIVVTVVVSPSLDAPMYFFLGYLSFMDAVYSTTVTPNMIIDLLYEKKTISFKACMSQLFIGHLFGGAEILLLVVMAYDRYVAICKPLHYLTIMNQRVCVLLLLLAWFGGFLHAVVQLLFVYNLPFCGPNIIDHFICDMYPLLKLACTDTYVIGLTVVANDGAICVVIFMLLVISYGVILHSLKNLSQEGRRKALSTCGSHITVVVLFFVPCIFMYVRPPSTLPIDKSLTVFYTVVTPMLNPLIYTLRNAEMKNAMRKLWASKGK

SEQ ID NO: 1456 - protein, 305 aa, Mus musculus
MGQSYNVTEFIFVDLTQDPAGKKALFVLFSLTYIVTMLGNLLIAVTVIASPSLNSPMYFFLACLSVLDAFYCNTISPNLIIGLLKDKNNISFRACMLQLFVEHLFGGVEVFLLVFMAYDRYVAICKPLHYLTIMNQRVCILLLLVAGVGGILHSLIQVLTVYKLPFCGPNVIDHFMCDMNPLLGLACTDTYFLGITVIANGGVICVGIFTFLLVSYGIILNSLKTHSQEGRRKALSTCSSHIMVVVCFFAPCIFIYARPVSNFSIDKYIAVFYTVVSPMLNPLIYTLRNSEMKNSIKKLWCKTLA

SEQ ID NO: 1457 - protein, 306 aa, Mus musculus
MGQNHNVTEFIFVGLSQDPAGQKVLFVLFSLTYIVTMFGNLLIALTVIASPSLNSPMYFFLACLSVLDALYCNTISPNLIIDLLYNKKNISFRACMLQLFVEHLFGGVEVFLLVFMAYDRYVAICKPLHYLTIMNQRVCILLLLIAGVGGILHSLIQVLTVYKLPFCGPNVIDHFMCDMNQLLGLACTDTYFLGITVMANGGVICVGIFTFLLVSYGIILNSLKTHSREGRHKALFTCSSHIMVVVCFFAPCSFIYARPVSNFPVDKYIAVFYTVVSPMLNPLIYTLRNSEMKNSIKKLWCKTLTT

SEQ ID NO: 1458 - protein, 310 aa, Mus musculus
MLNHSSVTEFILLGLSQNSKVEKVLFVIFLLIYLATIGGNMIIVVTIIYSPALLGSPMYFFLIFLSFLDACTSSTVTPKMIVDFFYEKKTISFECCMTQLFAVHFFTGMEVIVLSAMAYDRYVAICKPLHYSSIMTRRLCGILVMLSWAGGFLHSIIQIIFTLQLPFCGPNVIDHYMCDLFPLLKLACTDTHIFVILVFANSGSICIIIFSILLVSYSVILFSLRAHSSEGRRKALSTCGSHITVVLLFFVSCILIYARPAAFSSEKNALVFATIITPLLNPMVYTFRNREMKNAIRKLWKRWKVVSGDI

SEQ ID NO: 1459 - protein, 314 aa, Mus musculus
MGETNNVTEFVLLGLTQDPTGQKALFVMFLLVYIVTIVGNLLIVGTVIASPSLNSPMYFFLAFLSLMDAVYSTAILPKLLKDLVCDKKTISFTACLVQLFVEHLFGGAEVFLLVVMAYDRYVAICKPLHYLTVMNQQVCISLLVVAWVGGFAHALVQVLSVYKLPFCGPNVIDHFGCDMYPLLALVCTDTYFIGLTVVANNGAMCMVVFVLLLFSYGIILSSLKTHSQEGRRKALSTCSSHIMVVVLFFVPCIFMYVRPVSNFPIDKSISVFYTAITPMLNPLIYTLRNSEIKNSMGKLWSKMISIDRVRIFAY

SEQ ID NO: 1460 - protein, 314 aa, Mus musculus
MGQNNNVTEFILLGLTQDPAGQKVLFIMFLLIYIVTIVGNLLIVGTVIASPSLGSPMYFFLAFLSLMDAVYSTAILPKLLTDLLCDKKTISFTACLVQLFVEHLFGGSEVFILVVMAYDRYVAICKPLHYLTIMNRQVCILLLVVSWAGGFAHALLQVISVYLLPFCGPNVIDHFACDMYPLLGLACTDTYFLGLTVVGNNGAMSIVVFILLLVSYGIILNSLKTHSQEGRRKALSTCSSHIMVVVLFFVPCIFMYVRPVSNFPIDKYITVFYTVFTPMLNPLIYTLRNMEIKNCMAKLWCKMFTKDIKRDSHH

SEQ ID NO: 1461 - protein, 311 aa, Mus musculus
MMFSPNQTEVTEFILEGFSEHATLRLLLTGCFLSLYTIALMGNIVIIALVTSSTGLHSPMYFFLCNLATMDIVCTSSVIPKALIGLVSEENTISFKGCMAQLFFLLWSLSSELLLLTVMAYDRYVAICFPLHYSSRMSPQLCGALAVGVWSICAVNASVHTGLMTRLSFCGPKVITHFFCEIPPLLLLSCSPTYINSVMTLVADAFYGCINFVLTLLSYGCIIASVLRMRSAEGKRKAFSTCSSHLIVVSVYYSSVFCAYVSPASSYSPERSKVTSVLYSILSPTLNPLIYTLRNKDVKLALGRLLPFFPK

SEQ ID NO: 1462 - protein, 311 aa, Mus musculus
MMLRLNQTEVTEFVLEGFSEHPDLRLFLIGCFLTLYIMALMGNILIIALVTSSTGLHNPMYFFLCNLATTDILCTSSVIPKALVGLVSEENTISFKECMSQLFFLAWSASSELLLLTVMAYDRYVAICCPLHYSSRMSPQMCGALAMGVWSISAVNASVHTGLMTRLSFCGPKVITHFFCEIPPLLLLSCSPTYVNTIMTLLGDSFFGGVNFVLTLLSYGCIIASILRMRSAEGKRKAFSTCSSHLIVVSVYYSSVFCAYVSPASSYSPERSKVTSVLYSIVSPTLNPLIYTLRNKDVKLALGRILASFSH

SEQ ID NO: 1463 - protein, 312 aa, Mus musculus
MMMLRLNQTEVTEFVLEGFSEHPDLRLFLIGCFLSLYMMALMGNIVIIALVTSSTGLHSPMYFFLCNLATMDIVCTSSVIPKALVGLVSGENTISFKGCMAQLFFLVWSASSELLLLTVMAYDRYVAICFPLHYSSRMSPQLCGALAVGVWSICALNASVHTGLMTRLSFCGPKIITHFFCEIPPLLLLSCSPTYINSVMTLVADAFYGGINFVLTLLSYGYIIGSILRMRSAEGKRKAFSTCSSHLIVVSVYYSSVFCAYVSPASSYSPERSKVSSVLYSVLSPTLNPLIYTLRNKDVKLALGRILPSFSH

SEQ ID NO: 1464 - protein, 319 aa, Mus musculus
MVDLVLSMMMLNLNQTEVTEFVLEGFSEHPGLRLFLTGCFLSLYMMALMGNILIIALVTFSTGLHNPMYFFLCNLATMDIICTSSVIPKALVGLVSEENTISFKGCMSQLFFLTWSASSELLLLTVMAYDRYVAICFPLHYSSRMSPQLCGALAMVVWFIGLVNACVHTGLMTRLSFCGPKVITHFFCEIPPLLLLSCSPTYVNSILTLVADAFFVGINFMLTLLSYGCIIASILRMRSAEGKRKAFSTCSSHLIVVSVYYSSMFCAYISPASSYSPERSKVTSVLYSILSPTLNPLIYTLRNKDVKLALGRILASFSH

SEQ ID NO: 1465 - protein, 312 aa, Mus musculus
MMLLSLNQTGVTEFVLEGFSEHPGLRLFLTGCFLTLYMMALMGNIVIIALVTSSTGLHNPMYFFLCNLATTDIVCTSSVIPKALIGLVSEENIITFKGCMAQLFFLAWATSAELLLLTVMAYDRYVAICFPLHYSSRMSPQLCGALAVGVWSISAVNASVHTGLMTRLSFCGPKVITHFFCEIPPLLLLSCSSTYINSVMTLVADVFLGGINFMLTLLSYGFIIASILRMRSAEGKRKAFSTCSSHLIVVSVYYSSVFCAYISPASSYSPERSKFTSVLYSVVSPTLNPLIYTLRNKDVKLALGRMLASFSH

SEQ ID NO: 1466 - protein, 319 aa, Mus musculus
MVLSNITHFSPMFYLSGFPGLEAIEHWIFIPFFLMYLVAISGNCLILIIIKTSPRLHTPMYYLLSLLALTDLGLSVSTLPTMVGIFWFNYHGIYFGACQIQMFCIHSFSFMESAVLLVMSFDRFVAICHPLRYSSIITVQRVMRAGLCVILRGPVALIPIVLLLKDFPYCGPLVLSHSFCLHQEVIHLACVDTTFNNLYGLSLVVFTVMLDLVLIALSYGFILYTVAGLASQEEQIRAFQTCTSHLCAVLVFFVPMMGLSLVHRFGKHAPPAVHLLMANIYLFVPPMLNPVIYSIKTKEIRKAIIRFLGFRKVNSESWG

SEQ ID NO: 1467 - protein, 314 aa, Mus musculus
MMERENYTFNSDFILLGLFSSSKISLTFFSVIFFIFIMTITENALMILLIHRDSRLHTPMYFLLSHLSFMDILHISNIVPKMIADFLSGSRTISFAGCAFQIFLSLTLLGGECLLLAVMSYDRYVAICHPLRYPVLMRDNFSRLLAAGSWLVGILNSIVHTAFVLHFPFCHSRAIDHFFCEVPAMLKLSCIDTTHYERGVYVSGIIFLLIPFSMISISYVQILLTVFQMHSSGARQKSFSTCLFHMVVVIMYYGPFIFTYMRPRSYHTPGQDKFLAIFYTILTPTLNPIIYSFRNKDVLMALKNIVQSNILNKE

SEQ ID NO: 1468 - protein, 313 aa, Mus musculus
MMEYENYTFNDFILLGLFSSSKTSLTFFSVIFFIFIMAITENALMILLIHRDSRLHTPMYFLLSHLSFMDILHISNIVPKMIADFLSGSRTISFAGCAFQIFLSLTLLGGECLLLAAMSYDRYVAICHPLCYPVLMRDNFSRLLAAGSWLVGILNSIVHTAFVLHFPFCHSRAIDHFFCEVPAMLKLSCIDTTHYEQGVYVSGIIFLMVPFSMISISYVQILLTVFQMHSSGARQKSFSTCLFHMVVVIMYYGPVIFTYMRPRSYHTPGQDKFLAIFYTILTPKLNPIIYSFRNKDVLRALKNIVQSNILNKK

SEQ ID NO: 1469 - protein, 309 aa, Mus musculus
MEINNYTTVVEFVLQGLSEDPGLQALFLAFFLLLYILALAGNTLIIIAISLNSSLHTPMYFFLANLALLDIVCTSTVLPKLLEGLVGKSSHISYKGCMTQLFFLTWFLGAELLLLTAMAYDRYVAICRPLHYSMLMSWPICVLLAGSVWVISAASTSVHTGLMARLNFCGPNQIRHFLCEVPTLLLLSCSPTTLNNIMIVIADVYFGVVNFLLTMISYSFIITSILRIRSTEGKKRAFSTCSAHLVVVVLYYSTVIYTYLQPGSGSSLENGKVVALLYTAVSPTLNPAIYSLRNKDVKVALKKLFPCFQ

SEQ ID NO: 1470 - protein, 311 aa, Mus musculus
MMSRLNQTVVTEFILQGFSEHPSLRLFLTGCFLSLYVMALMGNILIIALVTFSTGLHSPMYFFLCNLATMDIICTSSVLPKALVGLLSEENTISFKGCMAQLFFLVWSLSSELLLLTVMAYDRYVAICFPLHYSSRMSPQLCGALAMGVWSICALNASINTGLMTRLSFCGPKVITHFFCEIPPLLLLSCSPTYVNSIMTLIADVFYGGINFVLTLLSYGCIIASILRMRSAEGKRKAFSTCSSHLIVVSVYYSSVFCAYVSPASSYSPERSKVTSVLYSFLSPTLNPLIYTLRNKDVKLAIGRLLPSFSH

SEQ ID NO: 1471 - protein, 312 aa, Mus musculus
MTMLSPNQTVVTEFVLEGFSEHPSLRLFLMGCFLSLYTVALMGNILIIALVTSSTGLHSPMYFFLCNLATMDIVCTSSVIPKALIGLVFEENTISFKGCMAQLFFLVWSASSELLLLTVMAYDRYVAICYPLHYSSRMSPQLCGVLAMSVWSVCALNASINTGLMTRLSFCGPKVITHFFCEIPPLLLLSCSPTYVNSVMTLVADAFYGGINFMLTLLSYGYIIASILRMRSAEGRRKAFSTCSSHLIVVSVYYSSVFCAYVSPASSYSPERSKVSSVLYSVLSPTLNPLIYTLRNKDVKLALGRRLPSFYH

SEQ ID NO: 1472 - protein, 304 aa, Mus musculus
MNGTLVTEFLILGFSDMPHLRILLFLSFLCLYMAAVSGNLLIMVTISASPTLHTPMYFFLVNLAVVDILCTSTILPKLLDTMVGGRTISYGGCMAQLFFFTWSLGVELLLFSAMAYDRFVAICCPLHYSTWMGPRVCAFLAGIVWAISLTNTSINSSLVLRLPFCSSNVVEHFFCEIPPLLKLSCAPTQLNEAMAFAADVFLAVGNFSVIILSYGFIVASILKIRSAEGKQRAFSTCSAHLIVVTMYYSTVIYTYIRPSSSYSLNKDKVVSIIYTSVAPTLNPLIYTLRNKDVKVALRRLFSCC

SEQ ID NO: 1473 - protein, 312 aa, Mus musculus
MSNCSNNALVTEFILLGFPELCHLQGLLFGFFLIIYVVTVLENLVIVGTISASRQLHTPMYFFLANLSVLETLYTTVTVPKLLADLLAGAKTISFSGCLTQLFLFLSLGSSECFLLSTMACDRYLAICRPLHYPAIMDSKLCLHLALSAWLGGFLASFVSTALISRLRFCGPNALNHFFCDISPLLQLSCTDTTAIEMLDFVAALAVLATSLIVTSVSYVHIIATVLRIPGGAGRRKAFSTCASHLVVVLIFYTTTTFMYARPHAISSFDLNKLVSVIYSVVTPLLNPIIYCLRNRDIREAFTKFLQPLRFP

SEQ ID NO: 1474 - protein, 312 aa, Mus musculus
MRRDNESTVSEFILLGLPIRAEDQGLYSALFLAMYLTTVLGNLLIILLIRLDSHLHTPMYFFLSHLAFTDISFSSVASPKMVINMLTHSQSISYAGCVSQVYFFSFFADLESFLLTSMAYDRYVAICHPLHYSQIMSENLCVLLIVVSWTLSTANSLVHTLLLVQLSYFRNNTIPHYFCDLSTLLKLSSSDTTINELVILVLGNMVITLPFICILVSYGHIGVTIMKIPSIKGICKALSTCGSHLCVVSLYYGAIIGLYFVPSSNNTSDKDAIVAMMYTMVIPMLNPFIYSLRNRDMKGALRNILSGRLWSQ

SEQ ID NO: 1475 - protein, 313 aa, Mus musculus
MRRDNESTVSEFILLGLPIQPEDQGLYSALFLAMYLTTVLGNLLIILLIRLDSHLHTPMYFFLSHLAFTDVSFSSVTAPKMLMNMLTHSQSISYAGCVSQVYFFSTFTDLDSFLLTSMAYDRYVAICHPLHYTTIMSQNLCVLLVVMSWVLSSANALVHTLLLARLSHFRNNTIPHYFCEPSALLSLSSSDTTINEMVILPLGTLVITLPFICILVSYGRIGVTILRTPSIKGICKALSTCGSHLSVVCLYYGAIIGLYLVPSSNNTNDKDVIVAVIYSLVTPMVNPFIYSLRNRDIKGALRNILNRRLCPQW

SEQ ID NO: 1476 - protein, 309 aa, Mus musculus
MRMDNDSALSEFILLGLPIRAEDQALYSVLILAMYLTTVLGNLLIILLIRLDSHLHTPMYFFLSHLAFTDISFSSVTAPKMLVNMLTHSKSIPYTGCVSQVYFFTVFASIDSFLLTSMAYDRYVAICHPLHYNIIMNLRLCVLLVVISWALSLTNALAHTLLLARLSHFRNNTIPHYFCDLSTLLKLSSSDTTINELVIFVLGNVVITLPFICILVSYGYIGVTILKTPSIKGIHKALSTCGSHLCVVSLYYGAIIGLYFVPSSNNTNDKDVIVAVMYTVVIPMLNPFIYSLRNRDMKRTLRNILSRTK

SEQ ID NO: 1477 - protein, 312 aa, Mus musculus
MKRDNESTVSEFILLGLPIRAEDQGLYSALFLAMYLTTMLGNLLIILLIRLDSHLHTPMYFFLSHLAFTDISFSSVTAPKMLMNMLTHSQSISYAGCVSQMYFYIVFADLENFLLTSMAYDRYVAICHPLHYTTIMSQSLCLFLVVVSWALSSGNALVHTLLLAKLSHFRNNTVPHYFCDLSAMLKLSSSDTTINELLILTLGTMVTIPPFICILVSYVRIGVTILRTPSIKGICKALSTCGSHLCVVSLYYGAIIALYFVPSSNNTNDKDVIVALMYTVVTPMLNPFIYSLRNRDMKGALRNVLSRRLCSQ

SEQ ID NO: 1478 - protein, 306 aa, Mus musculus
MDNESTVSEFILLGLPIRAEDQAVYSALFLVLYLTTVLGNLLIILLIRLDSHLHTPMYFFLSHLAFTDISFSSVTAPKMLVNMLTHSQSISYAGCISQEYFFTVFAGIDSFLLTSMAYDRYVAICHPLHYITIMNQNLCVLLVVVSWALSSANCLVHTLLLACLSHFRNNTIPHYFCDLSTLLKLSSSDTTINQLVILVLGNVVISLPFICILVSYGRIGVTIMKAPSIKGICKALSTCGSHLCVVSLYFGSIIGLYCVPSSNNINENNAIVSVMYTMVTPMLNPFIYSLRNRDIKRALKNILSRK

SEQ ID NO: 1479 - protein, 312 aa, Mus musculus
MMKSNQSTVSEFILLGLPIQPEDQAVYFALFLAMYLTTVLGNLLIILLIRLDSHLHTPMYFFLSHLAFTDISFSSVTAPKMLMNMLTHSQSISHAGCVSQIYFFLLFGCIDNFLLTSMAYDRYVAICHPLHYTTIMSQSLCVLLVMVSWAFSSSNGLVHTLLFARLSLFRDNTVHHFFCDLSALLKLSSSDTTINELVILTLAVVVITVPFICILVSYGHIGATILRTPSIKGICKALSTCGSHLCVVSLYYGAIIGLYFFPSSNNTNDKDVIVAVLYTVVTPMLNPFIYSLRNRDINGALRKTLSRRLCSH

SEQ ID NO: 1480 - protein, 311 aa, Mus musculus
MRRDNESTVSEFILLGLPIRAEEQGMYFALFLAMYLTTVLGNLLIILLIRLDSHLHIPMYFFLSHLAFTDISFSSVTAPKMLVNMLTHSQSISYTGCVSQVYFFAIFADLDSFLLTSMAYDRYVAICHPLHYSQTMSQTLCVLLVLVSWALSIANALVRTLLLAHLSHFRDNTIPHYFCDLSDWLKLSSSDTTINELVILVLGNVVITLPFICILVSYGHIGVTILKTPSIKGICKALSTCGSHLCVVSLYYGAIIGLYFVPSSNNTNDKDAIVAVMYTVVTPMLNPFIYSLRNRDMKGALRNILGRRLCS

SEQ ID NO: 1481 - protein, 313 aa, Mus musculus
MKSTRNQSSASEFILLGLPIQPEEQGMYYALFLATYLTTVLGNLLIILLIRLDSHLHTPMYFFLSHLAFTDISFSSVTAPKMLMNMLIHSQSISYAGCISQVYFFLFFADLDSFLLTSMAYDRYVAICHPLHYTRIMSQSICILLVIESWFLSFAGALVHTILLARLSFFRGNTVHHFFCDLSALIKLSSSDTSINELVILVVGSLVITVPFVCILVSYGRIGATILKTPSIKGICKALSTCGSHLSVVSLYYGAIIGLYFVPSSNDTNDKDVIVAVMYTMVTPMLNPFIYSLRNRDMKGALRNMLARATSSM

SEQ ID NO: 1482 - protein, 312 aa, Mus musculus
MTEGNESIVSEFILLGLPIQPEDQDLYSALFLAMYLTTVLGNLLIILLIRLDSHLHTPMYFFLSHLAFTDISFSSVTAPKMLMNMLTHSQSISYAGCVFQVYFFLFFADLDNFLLTSMAYDRYVAICHPLHYTTMMSQNLCVLLVVVSWTLSTANALVHTLLLARLTHFRDNTISHYFCDLSTLLKLSSSDTTTNKLVILLLGNVIITLPFICILVSYGLIAVTILKIPSMKGICKALSTCGSHLCVVSLYYGAIIGLYFVPSSNNTNVQDAIVAVMYNVVTPMLNPFIYSLRNQDMKGALRNILSRRLCLQ

SEQ ID NO: 1483 - protein, 310 aa, Mus musculus
MENESSVSEFFLQGISGFSEQQQLLYGLFLCMYLVTLTGNVLIILAIGSDPHLHTPMYFFLANLSFADMGLISSTVTKMLFNVQTRCHTISYTGCLTQMYFFLMFGDLDSFLLAVMAYDRYVAICHPLHYSTIMSARVCALMLALCWVLTNIVALTHTLLMARLSFCVVGEIAHFFCDITPVLKLSCSDTHVNELMVFALGGTVLMVPFVCIVISYIHIVFAILKVRTPGGGTKAFSTCSSHLCVVCVFYGTLFSAYLCPPSVVSTEKDVAAAAMYTVVTPMLNPFIYSLRNKDMKGALKRLLCHRKFLS

SEQ ID NO: 1484 - protein, 311 aa, Mus musculus
MENQSSVSEFFLRGISGFPEQQQLLYGLFLCMYLVTLTGNVLIILAISCDPHLHTPMYFFLANLSFADMGLISSAVTKMLFNVQTQRHTISYTGCLTQMYLFMMFGDLDSFFLAVMAYDRYVAICHPLHYSTIMSARVCALMLALCWVLTNIVALTHTLLMTRLSFCVVGEIAHFFCDITSVMKLSCSDTHVNELVLSGFGGTVLMVPFVSIVISYVRIVFAVLRVQTSGGSSKAFSTCSSHLCVVCVFYGTLFSVYLFPSSGETTEKDVVAAAMYTVVTPMLNPFIYSLRNKDMKGALKRLLCHRRKFSP

SEQ ID NO: 1485 - protein, 315 aa, Mus musculus
MSCIIRNNHSITSEFILLGLPINPELNGMYSALFLAMYLTTVLGNLLIILLIRLDPHLHTPMYFFLSHLAFTDISFSSVTAPKMLVNMLTHSQSISYTGCISQVYFFLFFADLDSFLLTSMAYDRYVAICHPLHYTTIMSQSLCVLLLIVSWVLSFASAILHTLLLAHLSFSGGNTLPHFFCDLSALLKLSSSDTTINELVIFTVGVVIITVPLICILVSYGYIGATILRTPSIKGIYKALSTCGSHLSVVSLYYGAIIGLYSFPSPNNSNNKDVIVAVMYTMVTPMLNPFIYSLRNRDIKGALRNILGRKASSQ

SEQ ID NO: 1486 - protein, 317 aa, Mus musculus
MGKISRVNQSVASDFLLLGLSEQPGEQPLLFGIFLGMYLVTMVGNLLIIFVISSDAHLHTPMYFFLANLSLTDACFTSASVPKMLANIYTQSQTISYSGCLTQLYFLLMFGGLDNCLLAVMAYDRYVAICQPLHYSTAMSPQLCALMLCTCWVLTNCPALMHTLLLTRVAFCAHTAIPHFYCDPSALLKLACSDTHINELMIITMGLVFLAVPLMLIVFSYVCISWAVLGIPSSGGRWKAFSTCGSHLTVVLLFYGSLMGVYLLPPSTHSTERESRAAVLYMIVIPMLNPFIYSLRNRDMKEAMGKLFGGGKTVFLL

SEQ ID NO: 1487 - protein, 309 aa, Mus musculus
MRMDNESTVSEFILLGLPIRAKDQAVYSALILAMYLTTVLGNLLIILLIRLDPHLHTPMYFFLSHLALTDISFSSVTVPRMLVNMLTQSQSISYTGCISQVYFFIVFGSIDSFLLPSMAYDRYVAICHPLHYTLIMNLNLCVLLVVVSWALSLVNALVHTLLLARLSHFRNNIIPHYFCDLSALLKLSSSDTSINELVILVLGNVVITLPFICILVSYGYIGVTILKTPSTKGIRKALSTCGSHLCVVSLYYGSVIGLYCVPSSNNTNDKDAIVAMMYTVVTPMLNPFIYSLRNRDMKRALRNILSRKK

SEQ ID NO: 1488 - protein, 316 aa, Mus musculus
MPGQNYSTISEFILFGFSAFPHQMLPALFLLYLLMYLFTLLGNLVIMAAIWTEHRLHTPMYLFLCALSISEILFTVVITPRMLSDMLSTHRSITFIACANQLFFSFTFGYTHSFLLVVMGYDRYVAICRPLHYHALMSLQGCARLVAWSWAGGSLIGMALTIIIFHLTFCESNVIHHILCHVFSLLKLACGERTAFVTIAVILVCVTPLIGCLVFIILSYIFIVAAILRIPSTEGRHKTFSTCASHLTVVIVHYGFASIIYLKSRGLYSQYTDTLMSTTYTVFTPFLSPIIFSLRNKELKNAIIKSFHRNVCQQSI

SEQ ID NO: 1489 - protein, 315 aa, Mus musculus
MEEGNQTGMVLFHFRPFSKLPEVQMLIFVLFLMMYLVSIGGNMSIVLTIWTNRCLHTPMYFFLANLASLEIFYSSTIAPLTLASILSTERTVVSLAGCGAQMFFFIFLGSADCILLAVMAYDRFVAICHPLRYTLIMSWHLCVQLALGSLLLGFILAMQLTVLIFRLPFCSSKEISLFYCDVLPVMRLACADTHVHEATLFVVSVIVLTIPFLLITLSYVFIVDAILKIRSAEGRHKAFSTCSSHLTVVLLQYGCGSLIYLCPSSSYSPERGQVVSVVYTFITPVLNPLIYSMRNRELKDALRKVVISFLLLEKQ

SEQ ID NO: 1490 - protein, 312 aa, Mus musculus
MDSYNQTFTGFILLGLFPPSKIGLFLFILIVLIFLTAWIGNLSMILLILLDSHLHTPMYFLLSQLSLIDLNYISTIVPKMVSDFMLGNKYISFIGCGFQIFLFLTFGGAETLLLASMAYDRYVAICFPLHYATHMNKRVCVMMITGAWILGSINSCAHTGYALQIPYCRSRAINHFFCDVPAMLTLACTDTWVYEYTVFVSTILFLVFPFIGIVCSYGRVFLAIYRMHSRAGKKKAYSTCSTHLTVVTFYYAPFAYTYLRPRSLRSPEEDKILAVFYTVLTPMLNPIIYSLRNKEVIGALRRMTHRICFAKI

SEQ ID NO: 1491 - protein, 318 aa, Mus musculus
MNWILHSTMVSPNQTVVTEFVLQGFSEHPSLRLFLMGCFLSLYTVALMGNMVIIALITSSTGLHSPMYFFLCNLATMDIICTSSVLPKALVGLLSEENTISFKGCMTQLFFLVWSGSSELLLLTVMAYDRYVAICLPLHYSSRMSPQLCGTFAVGVWSICALNASINTGLMTRLSFCGPKVITHFFCEIPPLLLLSCSPTYINSVMTLVADAFYGGINFLLTLLSYGCIIASILRMRSAEGKRKAFSTCSSHLIVVSVYYSSVFCAYISPGSSYSPERSKFTSVLYSVLSPTLNPLIYTLRNKDVKLALRRLFPSFSN

SEQ ID NO: 1492 - protein, 322 aa, Mus musculus
MPLEAESIMRNSTAVTDFILLGLTDDPLWQIVVFTFLLVTYMLSVTGNLIIIILTLSDAHLMTPMYFFLRNFSLLEISFTSVCIPRFLVTIVTGDRTISYNGCVAQLFFFIFLGVTEFYLLAAMSYDRYVAICKPLHYTTIMSNRVCILLVFSSWFAGFMIIFPPIILLLQLDFCASNIIDHFICDSSPILQLSCSNTHFLELMAFSLAVVTLMVTLTLIILSYTNIIRTILRIPSTNQRKKAFSTCSSHMIVVSLSYGSCIFMYIKPSARERVTLSKGVAVLNTSVAPLLNPFIYTLRNQQVKQAFKNMIQRIFFSSKNLP

SEQ ID NO: 1493 - protein, 312 aa, Mus musculus
MSNHTETTEFILLGLSDDPKLQVVIFVFLFITYTLSITGNLTIITLTLLDSHLQTPMYFFLRNFSVLEVSFTTVTIPKFLGTIISGDKTISFNNCIAQLFFFILLGVTEFYLLAAMSYDRYVAICKPLHYLTIMSQKVCTMLVFASWLTSFLIIFPALMLLLQLDYCGSNIIDHYTCDYFPLLQLSCSDTKFLERMGFSCAVFTLMLTLVLIFLSYTYIIKTIVKIPSASQRSKAFSTCSSHMIVISISYGSCIFMYIKPSATDRASLTKGVAILNTSVAPMLNPFIYSLRNQQVKQAFMNMTRKIVFSTSK

SEQ ID NO: 1494 - protein, 310 aa, Mus musculus
MDEENQTTTTEFLLLGFSDLRALQGPLFWLVLLVYLITFLGNSLIIFLTQTSPVLHSPMYFFLRHLSMVELLYTTDIVPRVLADLTSSHPQAISFRSCAAQMYFFIVLGISECCLLTAMAYDRYAAICQPLHYSTLMNHRACIAMVGTSWIMGIITATTHSSLIFTLPFPSRPIIPHFLCDILPVLRLASAGKHRSEISVMTATVVFIMIPFSLIVTSYARILGAILAIASSQSRRKVFSTCSSHLLVVSLFFGTASITYIRPRAGSSVTTDRILSLFYTVVTPMLNPIIYTLRNKEVIGALKHMKRQVP

SEQ ID NO: 1495 - protein, 312 aa, Mus musculus
MRNHSSITTFILLGLTDDPQLQVLLFIFLFLTYMLSVTGNLIIIILTLVDPHLKTPMYFFLRNFSFLEVSFTTVCIPRFLYSISSGDNTITYNACASQIFFVILFGATEFFLLAAMSYDRYVAICKPLHYMTIMNPRVCILLVITCWVSGLMIITPPLILGLQLDFCDSNAIDHFSCDAGPLLKISCSDTWVIEQMVILVAVFALIITLICVILSYTYIIRTILRFPSAQQRKKAFSTCSSHMIVVSITYGSCIFIYIKPSAKDEVAINKGVSVLTTSVAPLLNPFIYTLRNKQVKQAFSDSVKRITFISKS

SEQ ID NO: 1496 - protein, 311 aa, Mus musculus
MRNHTLVTTFILLGLTEDPKWQIVIFLFLFMTYVLSITGNLTIILLTLLDSNLKTPMYFFLQKFSFLEISLTSTCIPRFLVSIVTMDKTISVEACFTQLFAAFIFGIAQFFLLAVMSYDRYVAICRPLHYTTIMNNRVCTLLFVSCCLIAVFAICPGVIVSLSLEFCDTIIEHFFCDYSPILKLSCNDTRFMQLLNFIFAIFILLMTLALVMFSYGKIISTILRFPSAQQQKKAFSTCSSHMIVVSISYGSCIFMYIKPSAEERIYLNKGIAILTLALAPVLNPFIYTLRNKQVKEALKDIIKKCTSATSK

SEQ ID NO: 1497 - protein, 312 aa, Mus musculus
MPNKTSITEFILLGLTDDPELQIVIFFFLLATYLLSVSGNMTIITLTLSNVHLKTPMYFFLRNFSFLEILFTTVCIPRFLISIITGNTAISYNACMAQVFFLIFLGATEFFLLAAMSYDRYVAICKPLHYTAIINNKVCNQLVIASWSAGFLIVFPPVIMGLQLEFCDSNIIDHFTCDSSPMLQIACTDTKILELMAFFLAVFTLIVTLALVILSYTLILRTILKIPSAEQRKKAFSTCSSHMIVVSISYGSCIFMYVKTSAREGVVLSKGVAMLNTSVAPMLNPFIYTLRNQQVKQAFKDFTRKLLASKKH

SEQ ID NO: 1498 - protein, 311 aa, Mus musculus
MKNRTVTTFILLGLTDDIRLQTLLFIFLLFSYMLSLSGNLTIITLTLIDPHLKTPMYIFLKNFSFLEISLTTACIPRFLYSLSSGDKSIAYAACISQLLFIDIFAVTEFFLLAIMSYDRYVAICKPLHYMTIMNSRVCKNFIFFCWVAALIIVLPPISLGLGLEFCDSDIVDHFCCDAAPLLKISCSDTWLIEQMVIAGAVLTFIITFVCVVLSYGYIIKTILRFPSAKQRKKAFSTCSSHMIVVSITYGSCIFIYVKPSSKDNVAINKGISLIIVSISPMLNPFIYALRNKQVKQAFNYSIKKVAFLSKM

SEQ ID NO: 1499 - protein, 310 aa, Mus musculus
MEAQNHTTVKEFILLGLTENSTLRVILFMIFLGIYTVTLVGNFSIISLIRSCPQLHTPMYLFLSHLALVDIGFSTSITPIMLTGFLGHTVTLSVAACVAQFCIAVTFGTVECFLLAVMAYDRYVAICSPLLYSTHMSPRICFLLVGASYVGGCVNSGTFTSCLLILSFCGPNQIDHFFCDFPAVLKLSCSDVSIIGIIPSISAGSIIVITVFVIAVSYTYILITILNMRSTEGRHKAFSTCTSHLTAVTLYYGTITFIYVMPKSNYSTAQNKILSVFYTVVIPMLNPLIYSLRNRDVKEALRKAIIRIFP

SEQ ID NO: 1500 - protein, 312 aa, Mus musculus
METENDTMVTEFIILGLTDSATLRAILFVFFLPVYIVTVVGNISIILLIRSSPQLHTPMYLFLSHLAFVDIGYSTSVTPIMLISFLREETTIPLAGCAAQLGSDVAFGTTECFLLATMAYDRYVAICSPLLYSTQMSPAICCFLLGASYLGGCMNASSFTGCFVNLNFCGPNKVNHFFCDLFPLVKLSCGHAYIAEISPSISSASVLVSTLSTIIVSYIYILHSILRMRSAEGRNKAFSTCTSHLTAVTLFYGTVLFVYVMPKSSYSADQVKVASVVYTVVIPMLNPLIYSLRNKEVKEAMKKLMARTHWFP

SEQ ID NO: 1501 - protein, 310 aa, Mus musculus
METQNHTTVTEFILLGLTESSTLRVILFMVFLGIYTVTLVGNFSIISLIRSCPQLHTPMYLFLSHLAFVDIGFSTSITPTMFKGFLGNRLVLSVAACIAQFCITVTFGTVECFLLAVMAYDRYVAICSPLLYSTHMSPRICFLLVGASYVGGCVNSGAFTSCLSILSFCGPNQIDHFFCDFPAVLKLSCSDVSIIGIIPSISAGSIIVITVFVIAVSYAYILITILKMRSTEGRQKAFSTCTSHLTAVTLYYGTITFIYVMPKSNYSTAQNKILSVFYTVVIPMLNPLIYSLRNRDVKEALRKAIIRIFP

SEQ ID NO: 1502 - protein, 314 aa, Mus musculus
MAEGNQTVIFQFLLLGLPIPTEHQQLYYALFLLMYLTTVLGNLIIIILIRLDSHLHTPMYLFLSNLSFSDLCFSSVTMPKLLQNMQSQDSSITYAGCLTQMYFFLLFGDLESFLLVAMAYDRYVAICFPLHYMSIMSPSLCVSLVLLSWVLTTFHAMLHTLLMARLSFCEDNVIPHFFCDMSALLKLSCSDTHVNELVIFVTGGLILVIPFVLILVSYARIVSSILKVPSARGIRKAFSTCGSHLSVVSLFYGTIIGLYLCPSADNSTVKETVMAMMYTVVTPMLNPFIYSLRNRDMKGALARVICKKKVFFCL

SEQ ID NO: 1503 - protein, 317 aa, Mus musculus
MQGTTERNQTAISQFLLLGLPIPTEHQHLFYALFLAMYLTTVLGNLIIIILIHLDSHLHTPMYSFLSNLSFSDLCFSSVTMPKLLQNMQSQDPSIPYAGCLAQMYFFLFFADLESFLLVAMAYDRYVAICFPLHYMSIMSPRLCVSLVLLSWVLTTFHAMLHTLLMARLSFCEDNVIPHFFCDMSALLKLSCSDTYVNELVIFVMGSLILVIPFVLILVSYARIVSSILKVPSARGIRKAFSTCGSHLSVVSLFYGTVIGLYLCPSADNSTVKETVMAMMYTVVTPMLNPFIYSLRNRDMKGALISVLCKKKILFCL

SEQ ID NO: 1504 - protein, 314 aa, Mus musculus
MTERNKTVISQFLLLGLPIPPEHQQLFYALFLVMYLTTVLGNLIIIILIILDSHLHTPMYLFLSNLSFSDLCFSSVTMPKLLQNMQSQVPSIPYAGCLAQIYFFLFFGDLGNFLLVAMAYDRYVAICYPLHYTTIMSPRLCVSLVVLSWVLTTFHAMLHTLLMARLSFCEDNVIPHYFCDMSALLKLACSDTRVNEVVIFIVASIFLVLPFALITMSYVRIVSSILKVPSSQGIYKAFSTCGSHLSVVSLFYGTVIGLYLSPSSNNSTVKDTVMSLMYTVVTPMLNPFIYSLRNRDIKGALERVFCKRKIQLNL

SEQ ID NO: 1505 - protein, 313 aa, Mus musculus
MPGENVTVWSLFFLEGFSRYPRLEIVLFVFSLVMYLVTILGNCTLILITVLDSRLQTPMYLFLGNLSFMDICYTSASIPTLLVNLLSSKKTIIFSGCAVQMYLSLSMGSTECILLAVMAYDRYVAICNPLRYPIIMNRQVCVQMATISWVTGCLTALLETSFALQIPLCGNIINHFTCEILAVLKLACVSSLLMDLVMLVVSILLLPIPMLLICISYGFILSTILRISSTEGRNKAFSTCGAHLTVVILYYGAALSMYLKPSSSNSQEIDKIISLLYGVLTPMLNPIIYSLRNKEVKDAVIKLLGKVPLAPSV

SEQ ID NO: 1506 - protein, 312 aa, Mus musculus
MPNSIQLREKRMNVTEFILMGLTQNPQLQRILFFVLLITYIITVTGNLLIVGTIVCSQSLNSPMYFFLTFLSLIDACYSSCTIPKMLVDLLSETKTISFNGCILQLFVEHFLGASEIVLLVVMAYDRYVAICRPLHYASRMNHHMCCLLVGICWIVGFLHSFGQILVTLWIPFCGPNILDHFFCDIFPLLQLACTDTFLLGLLVACNGGVIPVITFTMLLMSYAVILYSLRTHSTAGRKKALSTCGSHITVVVLFFVPCIFMYMRPVATFPMDKAIAVFYIIITPLLNPVIYTVRNAEVKSAIRMLLKRMHL

SEQ ID NO: 1507 - protein, 309 aa, Mus musculus
MGNVTVFILLGLSDNQNIEVLCFVLFLFCYIAIWMGNVLIMVSITCTQLMDQPMYFFLHYLSLCDLCYTSTVTPKLLTDLLAERKIISYNNCMTQLFVLHFLGAIEIFILTAMAYDRYVAICRPLHYTVIMSRQRCNEILAACCTGGFVHSASQSLLIACLSFCHHNEIDHYFCDVYPLLKLACTDTHRIGLFVIVDSGLIALVTFVVLMVSYFLIAYTISVYPAESRSKALSTCSSHITIVVLFFVPVFFIYIRPNITFPEDKVFALFYTIIAPMFNPLIYTLRNIEMKRAIKKMWYHQIPSYKKQIP

SEQ ID NO: 1508 - protein, 307 aa, Mus musculus
MESTNNITEFILLGLSQNKKIKALCFLMFLFCYIAILGGNMIILISITCSQLIEQPMYFFLNYLALSDLCYTSTVTPKFLTDLLVERNKISYTSCMAQLFTMHFFGGIEILILTVMAYDRYVAICKPLHYSIIMSRGRCHAMVTACCAGAFIHSFLQSLLAISLPFCGHNEMDHYFCDIYPLVTLSCTNTHRVGLLVVVNSGMMGLVTFVVLMWSYSFILYTIRAYPAESRSKALSTCSSHVTVVIFFFVPVLFIYIRPATTYPEDKVFALFYTILAPMFNPLIYTLRNTEMKNALRKVWCHKLFFI

SEQ ID NO: 1509 - protein, 313 aa, Mus musculus
MERSLQLANRSDDQDFILLGLSASKDIKDGLFVIFLTLYLLIFLENMLVIYLISSHHELLHKPMYFFLGNLSCLEMCYVSVTMPTLLVGLRSSPYHVSFSFCMAQLFLFMSLIGTKCTLLASMAYDRYVAICCPLHYSVIMRPQVCWGLALSSWVGGLLVSAIKTTCIASLSYCGPNVLNHFFCDVSPLLNLSCTHVALTELIDFISAIIIFCGSLLVALASYVAIGRVLIKMPSAAASHKALSTCASHLLVMGLFYSVVLFMYSRPSHVKSTDLNKVLSVIYTVATPMCSPIIYCLRNREVHAVLRRTPCLC

SEQ ID NO: 1510 - protein, 314 aa, Mus musculus
MEKSLELGNVTRVQEFVLLGLSTRLGIRDALFVIFLTLYLLTLLENTLIIYLICSHSELHKPMYFFLGNLSCLEMCYVSVTMPTLLMGLWTGPCHVPFTGCMTQLFFFISLICTECTLLASMAYDRYVAICRPLHYPLLMRPQVCLGLALSSWLGGLLVSVIKTACIASLSYCGPNVLNHFFCDVSPLLNLSCTHVALTELVDFISAIVILWGSLLVAMASYVAIGRTVLGMPSAAARHKAFSTCASHLVVVGIFYSATIFIYARPSRIEAMDLNKVLSVIYTVVTPMCNPVIYCLRNREVQSAFHRTMRWSSV

SEQ ID NO: 1511 - protein, 312 aa, Mus musculus
MERSLALANMTRVQQFILLGLSTRLDIRDALFAVFLTLYLLTLLENTLIIYLICSHKELHKPMYFFLGNLSCLEMCYVSVTMPTLLMGLWNGLYHIPFIACMTQLFFFIVLVGTECILLASMAYDRYVAICRPLHYPVLMRPQVCLGLAMISWLGGLLVSMIKTTCIATLSYCGPNVLNHFFCDVSPLLNLSCTHVALTELVDFISAIVILWGCFLTTMASYVAIGRAVLRMPSTTARYKAFSTCASHLVVVGIFYSVTIFIYARPKRIEAMDLNKVLSVIYTVVTPMCNPVIYCLRNKEVQVALHRTMHWS

SEQ ID NO: 1512 - protein, 312 aa, Mus musculus
MARSLELANMTRVQKFLLLGLSTRLDIRDALFAVFLTLYLLTLVENTLIIYLIFSHKELHKPMYFFLGNLSCLEMCYVSVTMPTLLVGLWTGPYHIPFTLCMTQLFFFIVLICTECTLLASMAYDRYVAICRPLHYPLLMRPQVCLGLALSSWLGGLIVSVAKTTCIASLSYCGPNVLNQFFCDVSPLLNLSCTHVALTELVDFISAIVIFCGTLLVSLASYSAIGMAVLRMPSAAARRKAFSTCASHLVVVGIFYSAALFIYCRPSRIKSMDLNKVLSVIYTVVTPLCNPIIYCLRNKEVHTVLKKTLHWP

SEQ ID NO: 1513 - protein, 309 aa, Mus musculus
MMRNQTLVTEFILQGFSEHPQYQLPLFFCFLSLYCVALTGNVLIILAITCNPGLHTPMYFFLFNLATMDIICTSSIMPKALRGLVSKRNPISYGGCMAQLYFLTWSASSELLLLTVMAYDRYAAICHPLHYSTMMSKAFCSMLAAGVWALCAFNTAIHTGLMTRLSFCGPNVITHFFCEVPPLLLLSCSSTYVNSVMIVLADAFYGILNFLMTIVSYGFIISSILKMRTSEGKQKAFSTCSSHLIVVCMYYTAVFYAYISPVSSYNAEKSKLAGVLYTMLSPTLNPLIYTLRNKEVKAALRKFFPFLRN

SEQ ID NO: 1514 - protein, 307 aa, Mus musculus
MDGDNETMVAEFLLLGLSGKSEQEEVVFGMFLGMYLVTISGNLLIILAISCDPHLHTPMYFFLANLSSVDICFSSVTVPKALVNHVLGSKSISYTECMIQIYFFITFINMDGFLLSVMAYDRYVAICHPLHYTMMMRSRLCVLLVAISWVITNLHALLHTLLMVRLTFCSHNAVHHFFCDPYPILKLSCSDTFINDLMVFTVGGVIFLTPFSCIVVSYVYIFSKVLKIPSARGIRKALSTCGSHLTVVSLFYGAILGVYMRPSSSYSLQDTVATVIFTVVTPLVNPFIYSLRNQDMKGALRKIMLRS

SEQ ID NO: 1515 - protein, 315 aa, Mus musculus
MVRENQSTAIEFLLLGIAGQSKEEEVIFGMFLWMYLVTVCGNLLIILAISCDPHLHTPMYFFLANLSSVDICFSSVTVPKALVNYMLGIKTISYTECMTQIYFFITFINMDGFLLSVMAYDRYVAICHPLHYTMMMRPRLCVLLVAISWAITNLHALLHTLLMVRLTFCSHNAMHHFFCDPYPILKLSCSDTFINDITAFTVGGLTSITPFTCITVSYGYILSNVLKFPSIQGIRKALSTCGSHLTVVSLFYGAILGVYMHPSSTYSVQDMVATAFFTVVTPMVNPFIYSLRNRDVKGALRKLMCRRLTSSRFYN

SEQ ID NO: 1516 - protein, 307 aa, Mus musculus
MDGDNQTIVTEFILLGLTRQSEKEEVVFGLFLWMYLVTISGNLLIILAISCDPHLHTPMYFFLANLSSVDISAPSVIVPKALVNHMLGSKSISYTGCMTQIYFFITFSNMDGFLLSVMAYDRYVAICHPLHYTMMMRPRLCVLLVAISWAITNLHALLHTLLMVRLTFCSHNAVHHFFCDPYPILKLSCSDTFINDLMVFTIGGLVFMTPFTCIIVSYAYIFSKVLKLKSAHGIRKALSTCGSHLTVVSLFYGAILGIYMHPSSTYTVQDTVATVIFTVVTPMVNPFIYSLRNRDIKGALRKIILRS

SEQ ID NO: 1517 - protein, 305 aa, Mus musculus
MEEANQTVVSEFIFQGLCASKELQILLLLPFSTLYMMTVVGNLFVVILIIIDHHLHSPMYFLLANLSFIDFCLSSVTTPKLITDLLKDNKTISFGGCMSQILCVHFFGGGEMVLLVTMAYDRYVAICRPLHYSSIMDRQKCIWLVVISWTIGFIHAMSQLILILDLPFCGPRVIDSFFCDIPLVMKLACMNTDTLGIVINADSGVLATTCFILLLISYTYILLTVQLHSKDGSSKALSTCTSHIIVVVLFFGPCIFIYLWPVSITWVDKFLAVFYTVITPLLNPAIYTLRNKDIKNAIKKLKNHM

SEQ ID NO: 1518 - protein, 305 aa, Mus musculus
MEDSNRTVSSEFIFQGLCSSRQLEIFLLLPFSILYLMAVVGNLFVVILIIIDHHLHSPMYFLLANLSFIDFCLSSVTTPKLTIDLLKENKTISFVGYMRQIVCVHFFAGGEMVLLVTMAYDRYVAICRPLHYSSIMDRQKCIWLVVISWIVGFVHAISQMLLILDLPFCGPRVIDSFFCDIPLVMKLACMNTDTLEILINADSGILATTWFILLLISYTYILLTVQHRSKDGSSKALSTCTSHIIVVLLFFGPIIFIYLWPVSITWVDKFLAVFYSVITPLLNPAIYTLRNKDIKNAIKKLISHK

SEQ ID NO: 1519 - protein, 305 aa, Mus musculus
MELENQTRVIEFFLLGLSEDPELQPILFGLFLLMYLVTVSGNLLIILAIVSDAHLHTPMYFFLSNLSFTDICFSTTTVPKMLTNLQKQSKSISYTGCITQLSFVLLFAGMENFLLAAMAYDRYVAICNPLRYTDIMKLHLCFVMIFLSLYISIVDALLHGLMTLRLSFCTFLEIPHFFCELYQVIKIACSDTLINNILIYVMSSALGGMPLVGIIFSYYKIISSILRMPSPGGRHKAFSTCGSHLSVVSLFYGTAFGVYISSAFTESYRRTSVASLMYTVFPPMLNPFIYSLRNKDMKKALRKIV

SEQ ID NO: 1520 - protein, 312 aa, Mus musculus
MESANQTGISEFFLIGLIYVPELQPLFFDLFLSMYLITIIGNLLIILAVSKDSRLHTPMYFFLCNLSFTDICTSTTTVPKLLLNIQVHDQSITYIGCLSQVCFILTFCVLERCLLTVMAYDRYVAICQPLRYTIIMNPFLCICLVLLSLIISTINALLHTLLVLPLSFCTEQNVPNFFCELGQITKLSCSDTFINILFIYTATIVFSVIPLSGIIFSYIQIVSSILKIPSVGGRHKAFSTCGSHLSVVSLFYGTGLGVYMNASVSNSSISNVITSMMYSVVPQMLNPFIYSLRSKEIKGSLRQLIIGIICFP

SEQ ID NO: 1521 - protein, 311 aa, Mus musculus
MKPENQTNILEFLLLGFSQYPEHQPMLFGLFLLMFVVAVLGNLLIILAVSIDSHLHTPMYFFLSNLSFSDIGFISTTVPKMLVNIQTQSKSISYAECITQIYFFMLFGGMDTLLLTVMAYDRFVAICHPLHYSVIMNPQLSGLLVLVSWFISFSYSLIQSLLMLRLSFCTNQIIKHFYCEYAKALTIACSDTLINHILLYIVIWVLGFIPFSGILYSYYKIFSSILRIPSTDGKYKAFSTCGSHLSVVSLFYGTGLSVYLSSDATSSSGKGVVASVMYTVVTPMLNPFIYSLRNKDIKKALKTLGRILLLK

SEQ ID NO: 1522 - protein, 311 aa, Mus musculus
MKPENQTNILEFLLLGFSQYPEHQPMLFGLFLLMFVVAVFGNLLIILAVSIDSHLHTPMYFFLSNLSFSDIGFISTTIPKMLVNIQTQSKSISYAECITQIYFFMLFGGMDTLLLTVMAYDRFVAICHPLHYSVIMNPQLSGLLVLVSWFISFSYSLIQSLLMLRLSFCTNQIIKHFYCEYSRALTIACSDTLINHILLYILICVLGFIPFSGILYSYCKIVSSILRIPSTDGKYKAFSTCGSHLSVVSLFYGTGLGVYLSSDVTSSSGKDVVASVMYTVVTPMLNPFIYSLRNKDIKKALKTLGRILLLK

SEQ ID NO: 1523 - protein, 311 aa, Mus musculus
MQNQSLVNEFILLGLSQNTKVEKILFLLFLLIYLATIGGNMIIVATIIYSPALLGSPMYFFLVFLSLLDACTSTVVTPKMIVGFFYERKIISFEGCMTQLFAIHFFTAVEVIVLSAMAYDRYVAICKPLHYLSIMSKRVCGVLVGIAWAGGFLHSIIQIVFTLQLPFCGPNVIDHYMCDLFPLLKLACTDTQIFVILVFANSGSICIIIFSLLLVSYGVILFSLRAHSSEGRYKALSTCGSHITVVVLFFVPCILIYARPSSPFSFEKNTLIFANVLTPLLNPMVYTFRNKEMKSAIRKMWKRLVVVSDKY

SEQ ID NO: 1524 - protein, 304 aa, Mus musculus
MQNQSFVTEFILLGLSQNLNVEKMLFVLFLFIYIATIGGNMMIVVTIIYSPALLGSPMYFFLAFLSFLDACTSSTVTPKIIVDCFYERKTISFECCMTQLFTVHFFTGAEVIVLASMAYDRYVAICKPLHYSSIMTQRLCGILVVVSWAGGFLHSIIQIIFTLQLPLCGPNVIDHYMCDLFPLLKLACTDTHIYVLLIFANSGAICIIIFSLLIVSYGVILFSLRAQSSEGRRKALSTCGSHITVVLLFFVPCILIYARPTSAFSFEKNMLIFVNVLTPLLNPMVYTFRNKEMINAIKKIWKRF

SEQ ID NO: 1525 - protein, 311 aa, Mus musculus
MENQSIVNEFILLGLSQNPKIENILFVVFLLVYLATIGGNMMIIATIIYSPALLGSPMYFFLIFLSLLDTCTSTVVTPKLILDFFYERKTISFEGCMTQLFAFHFFTGAEVIVLAAMAYDRYVAICKPLHYSSIMTWRLCGVLVGVAWTGGFLHSIIQIIFTLQLPFCGPNVIDNYICDLFPLLKLACTDTHIFVFLVFANSGSICIIIFSLLLVSYGVILFSLRGHSSEGRLKALSTCGSHITVVVLFFVPCILIYARTTSPFPYEKYVAIFVNVITPLLNPMVYTFRNKEMKNAIRKMCRRSKVVSDNY

SEQ ID NO: 1526 - protein, 311 aa, Mus musculus
MQNQSFVTEFILLGLSQNLYVEKILFVLFLLIYLATIGGNMIIVVTIIYSPALLGSPMYFFLIFLSLLDALTSSTVTPKIIVDCFYERKTISFECCMTQLFTVHFFTGAEVIVLASMAYDRYVAICKPLHYSSIMTRRLCGILVVVSWAGGFLHSIIQIIFTLQLPFCGPNVIDHYMCDLFPLLKLACTDTHIYVLLIFANSGAICIIIFSLLLVSYGIILFSLRAHSSEGRRKALSTCGSHIIVVLLCFVPCLLIYARPTSAFSFEKNMLIFINVLTPLLNPMVYTFRNKEMKNAIRKMWKRLIVVSDKF

SEQ ID NO: 1527 - protein, 311 aa, Mus musculus
MQNQTLVTEFLLLGLSQNPKVQKIVFVVFLFIYIATVGGNMIIVVTIICSRALLGSPMYFFLACLSFLDACISSVITPKVTVDLLYEKRTISFEGCMAQVFAVHFFTGVEVIVLISMAYDRYVAICKPLYYSSIMNRRLCGILMGMAWTGGFLHSTIQIIFILCLPFCGPNVIDHFLCDLFPLLKLACTDTHIFVILVFANSGSFCIIIFSLLLISYGVILFSLRTHSTEGRRKALSTCGSHITVVVLFFVPCIIIYARPTSAFFSEKNMFLFATILTPLLNPMIYTFRNKEMKNAIRKIWKKLILDYGIS

SEQ ID NO: 1528 - protein, 311 aa, Mus musculus
MHNQSYVNEFILLGLSQNPQIEKISFFIFLLVYLATLVGNMIIVVTIVYSPALLGSPMYFFLAFLSFLDACVSSVVTPKMIADMTYERKIISFECCMTQVFAVHFLTAVEVIVLAAMAYDRYVAICKPLHYSFIMNRRLCGTLVGVAWAGGFLHSIIQIAFTLKLPFCGPNVIDHFICDLFPLLKLACTDIHIFIILVFANSGSICIIIFSFLLISYGVILFSLRAHSSEGRRKALSTCGSHITVVVFFFVPCILIYARPTSAFSFEKNVFVFTDVLTPLLNPMVYTFRNKEMINAIGKMRKRLIMVPDKY

SEQ ID NO: 1529 - protein, 307 aa, Mus musculus
MQQNSTVTEFILLGLTQDPLKQKMVFIIFLVFYMGTVVGNTLIIVTIKFSRTLGGPMYFFLFYLSFADSCFSTSTAPRLIVDALSKKNIISYNECMTQVFALHLFGCMEVFVLIFMAVDRYVAICKPLHYPVIMRRQVCVILIIVAWIGSFLHSTTQIVLALRLPFCGPNLIDHYCCDLQPLLELACMDTHMINLLLVFNSGAICSSSFLIFIISYFVILYSLRNHSAEGRKKALSTCTSHIIVVVLSFGPCIFIYARPPTTFSMDKMVTVFFTIGSPFLNPIIYTLRNAEVKNAMKKLWHVKIMTE

SEQ ID NO: 1530 - protein, 307 aa, Mus musculus
MQQNSTVTEFILLGLTQDPLKQKMVFIIFLVFYLGTVVGNTLIIVTIKFSRTLGSPMYFFLFYLSFSDSCFSTSTAPRLIVDALSKKNIISYNECMTQVFALHLFGCMDVFILIFMAVDRYVAICKPLRYSVIMRRQVCVILIIVAWIGSFLHSTTQIVLALRLPFCGPNLIDHYCCDLQPLLKLACMDTYMINLLLVFNSGAICSSSFVILIISYFVILHSLRNHSAEGRKKALSTCTSHIIVVILSFVPCIFIYARPPTTFPMDKMVTVFYTIGTPFLNPIIYTLRNAEVKNAMKKLWHVKFIMK

SEQ ID NO: 1531 - protein, 307 aa, Mus musculus
MQHNSTVTKFILLGLTQDPLKQKMVFIIFLVFYLGTVVGNTLIIMTIKFSRTLGSPMYFFLFYLSFADSCFSTSTAPRLIVDALSKKNIISYNECMTQVFALHLFGCMEIFVLILMAVDRYVAICKPLRYPVIMSRQVCVILIILAWIGSFIHSTAQIVLALRLPFCGPNLIDHYCCDLQPLLKLACMDTYMINLLLVSNSGAICSSSFVILIISYFVILHSLRNHSAEGRKKALSTCTSHIIVVILFFGPCIFIYARPPTTFSMDKMVAVFYTIGTPFLNPIIYTLRNAEVKNAMKKLWHVKIMNE

SEQ ID NO: 1532 - protein, 311 aa, Mus musculus
MQNQSSVTEFIILGLSQNPKIEKILFVVFLLVYMATVGGNMIIVVTIIYSPALLSSPMYFFLAFLSFLDACVSSTVTPKMVVDFLHEKKTISFGCCMTQLFSVHFFSGAEMIVLAAMAYDRYVAICKPLHYSSILTRRLCSILVAISWAGGFLHAIVQVIFRLQLPLCGPNVIDHYMCDLFPLLKLACTDTHIFVLLVFANSGAICIIIFSLLLVSYGVILFSLRAHSSEGRRKALSTCGAHVTVVVLFLVPCILIYARDTSAFSYEKDTLIFVNVLTPLLNPMVYTFRNKEMINAIRKMWKRLIVIFVRY

SEQ ID NO: 1533 - protein, 311 aa, Mus musculus
MLNQSFVTEFILLGLSQNPKVEKILFVLFFLVYLATIGGNIVIVVTILFSPALFGSPMYFFLSFLSFLDACISSVITPKMIVDFFYETKTISFECCMVQLFAVHFFTGVEVIVLSAMAYDRYVAICKPLHYSSIMNQRLCVILVGIAWAGGFLHSITQIIFTLQLPFCGPNVIEHFICDLFPLLKLACTNTHIFVILVFANSGSICIIIFSLLLVSYGVILFSLRSHSSEGWSKALSTCGSHITVVLLFFVPCILIYARNTSAFSFEKNVFIFADVLTPLLNPMVYTFRNKEMKNAIKKIWRRLFNISDKH

SEQ ID NO: 1534 - protein, 311 aa, Mus musculus
MNNQSCVTEFIFLGLSQNSKVEKILFFIFLLIYLATIGGNMIIVVTIIYSPALLGSPMYFFLIFLSLLDACTSSTVTPKMIVDFFYDRKTISFECCMTQLFAVHFFTGMEVIVLSAMAYDRYVAICKPLHYSSIMNRRLCGNLVMVSWAGGFLHSIIQIIFMLQLPFCGPNVIDHYMCDLFPLLKLACTDTYIFVILVFANSGSICIIIFSILLVSYGVILYSLKAHSSEGKFKALSTCGSHIIVVVLFFVPCILTYARPISAFSFEKNAVVFTTVLTPLLNSVVYTFRNKEMKNAIRKMWKKLIAVSDKH

SEQ ID NO: 1535 - protein, 319 aa, Mus musculus
MTARNMTTMSGFLLMGFSDNHELQILQALLFLLTYLLGSAGNFIIITITTLDPQLQSPMYYFLKQLSTLDLSSLSVTVPQYVASSLARSGYISYGQCMLQIFFFTGLAWSEMATLTVMSYDRYVAICLPLHYEVIMSPRKCTWAVAAVWLSGGISGTLFTASTLSIRFCGDKIIHQFFCDIPQLLKLSCSNDYFGVLEVSTFMSVMAFACFVGIAFSYGQIFSTVLRMPSAEGRSKVFSTCLPHLFVVSFFLSTGICAYLKPTSDSPTALDLMLSIFYTLLPPTLNPVIYSLRNESLKRALKKLLLSEEFIRKKCLFYF

SEQ ID NO: 1536 - protein, 315 aa, Mus musculus
MSKMDGGNHSLVSEFVLLGLAHSQNIQALLFMIFLMLYLLIVSGNIVIMVLITTDPHLHSPMYFLLANLSFVDMWLSSVTTPKMITDFFRENKTISFSGCMSQVFFAHCIAAGEMVLLVVMAYDRYVAICKPLHYFTIMNLKRCTGLVLTSWTIGFVHALSHLVVIVELPFCSAKEIDSFFCDMPLVIKLACMDSHNLDILMYADCGVVGVTCFILLLISYTYILITVRRSSKAGASKALSTCTAHITVVMIFFVPCIFIYVWPLNITWLDKFLAVFYSVFTPLLNPAIYTLRNKEMKNAMRRFINNYMDSQGKS

SEQ ID NO: 1537 - protein, 312 aa, Mus musculus
MDGDNQTVVSEFVLLGLSNSKNLQVLLFLIFLLLYLLIMSGNIVIQILITTDPHLHSPMYFLLANLSFVDMLLSSNTTPRMIIDFFREKKTISFAGCMSQIFFSHCIASGEVVLLALMAYDRYVAICKPLHYFTIMNLKRCTGLVLTSWTIGFLHGISHVVVLLQLPFCGPNKIDSFFCDMPLVIKLACMDSQDLNTLMNGECGILAVTCFILLLISYTYILITVHQNSKTGASKALSTCTAHITVVMIFFLPCFFIYVFPLNITWLDKFLAVFYSVITPLLNPVIYTLRNKEMKNAMKRFIGKFLRAKGNS

SEQ ID NO: 1538 - protein, 312 aa, Mus musculus
MDGSNRSLVSEFVLLGLARSQNLQVLLFIIFLVVYLLILSGNTIVMFLIITDKNLHSPMYFFLANLSFVDMWLSSATTPKMITDFLKEPKIISFAGCMSQVFFDHCVGAVEMLLLVVMAYDRYVAICKPLHYFTIMSLKRCAGLVLTSWAIAFVHAMSQLLAVVQLPLCGHMEIDSFFCDIPLIIKLACMDSHILDIYMNVDCGFVVVTCFILLLISYTYILLTVRQSSKAGASKALSTCTAHITVVMIFFVPCIFIYVWPLSITWLDKFLAVFYTVFAPLLNPAIYTLRNKEMRNAVKKLKNHFMDYKGNT

SEQ ID NO: 1539 - protein, 312 aa, Mus musculus
MDRDNQTVLSEFVLLGLSNSKNLQVLLFLIFLLLYLLIMSGNIIIQILITTDPHLHSPMYFLLANLSFVDMWLSSNTTPKMIIDFLSENKTISFAGCMSQVFLSHCIAGGEMVLLVVMAYDRYVAICKPLHYFTIMNLKRCTGLVLTSWTIGFIHGISYFLVVVQLPFCGPNKIDSFFCDMPLVIKLACMDSHDLNTLMNAECGVVAVTCFMLLLFSYTYILITVRQTSKNGASKALSTCTAHITVVMIFFLPCMFIYVWPLSITWLDKFLAVFYSVFTPLLNPAIYTLRNKEMKNAMKRFIGKFLCPKGNS

SEQ ID NO: 1540 - protein, 312 aa, Mus musculus
MDGDNQTVVSEFILWGLAHSKNIQVLLFVIFLMLYLLIMSGNIVILTLITTDTHLHSPMYFLLANLSFVDMWLSTNTTPKMITDFLREIKIISFAGCMSQVFFSHCIAAGEMVLLVAMAYDRYVAICKPLHYFTIMNLKRCSSLVLTSWTIGFIHGIIYIVVIVHLPFCGPNEIDSFFCDMPLVIKLACMDYHYLNTLMNADCGLVAITCFILLLTSYTYILMTVCKSSKAGASKAMNTCTAHITVVLIFFVPCIFIYVWPLNITWLDKFFAVFYSVFTPLLNPAIYTLRNKEMKNAMKRFIGNFLGPKVNL

SEQ ID NO: 1541 - protein, 308 aa, Mus musculus
MSPRCQNLCFWDFPAHRIFRYLLFVIFLILYLLIISGNIVIMILITIDRHLHSPMYFLLANLSFVDIWLSSVTTPKMVIDFLREHKTISFEGCMSQVFFAHCIAAGEMVLLLVMAYDRYVAICKPLHYFTIMNLKRCTGLVLTSWTVGFVHALSQLVAVLQLPLCGPLEIDSFFCDMPLVIKLACTDSHDLDILMNADCGIVVVSCFIMLLISYTYILITVRRSSKAGASKALSTCTAHITVVMLLFLPCIFIYVWPLNITWLDKFLAVFYSVVTPLLNPAIYTLRNKEIKNALKRFKSYVMNHKVNT

SEQ ID NO: 1542 - protein, 309 aa, Mus musculus
MTAENQSTVTEFILGGLTNRPELQLPLFLLFLGIYVVTMVGNLGMITLIGLNSQLHTPMYFFLSNLSLVDLCYSSVITPKMLINFVSQRNLISYVGCMSQLYFFLVFVIAECYMLTVMAYDRYVAICQPLLYNIIMSPALCSLLVAFVYAVGLIGSAIETGLMLKLNYCEDLISHYFCDILPLMKLSCSSTYDVEMAVFFLAGFDIIVTSLTVLISYAFILSSILRISSNEGRSKAFSTCSSHFAAVGLFYGSTAFMYLKPSTASSLAQENVASVFYTTVIPMFNPLIYSLRNKEVKTALDKTLRRKVF

SEQ ID NO: 1543 - protein, 309 aa, Mus musculus
MAAENQSTVTEFILRGLTNRPELQLPLLLLFLGIYIITMVGNLGMITLIGLNSQLHTPMYFFLSNLSLVDLCYSSVITPKMLINFVSQRNLISYVGCMSQLYFFLVFVIAECYMLTVMAYDRYVAICQPLLYNIIMSPALCSLLVVFVYAMGLIGSTIETSLMLKLNYCEDLISHYFCDILPLMKLSCSSTYDIEMAVFFLAGFNIIVTSLTVLISYAFILSSILRISSNEGRSKAFSTCSSHFAAVGLFYGSTAFMYLKPSTASSLAQENVASVFYTTVIPMLNPLIYSLRNKEVKTALDKTLRRRVF

SEQ ID NO: 1544 - protein, 310 aa, Mus musculus
MTAKNSSVTEFILAGLTDQPGLRMPLFFLFLGFYMVTVVGNLGLISLIGLNSHLHTPMYFFLFNLSLIDFCYSSTISPKMLMSFISKKNIISHPGCMAQLFFFCFFVISESFILSAMAYDRYVAICNPLMYMVTMSPQVCLLLLFGVYLMGFVGAMAHTISMARLTFCADNIVNHYMCDILPLLEHSCTSTYVNELVVFIFVSFDIGVPIVTIFISYALILSSILHMHSTEGRSKAFSTCSSHMIVVCLFFGSGAFMYLQPPSVLSLDQGKVSSLFYTIVVPMLNPLIYSLRNKDVKVAVRKTLDRRIFS

SEQ ID NO: 1545 - protein, 310 aa, Mus musculus
MTAKNSSVIEFILAGLTDQPGLRMPLFFLFLGFYMVTVVGNLGLISLIGLNSHLHTPMYFFLFNLSVIDFCYSSTIIPKMLMNFISRKNIISHSGCMTQLFFFCFFVVSESFILSAMAYDRYVAICNPLMYTVTMSPQVYLLLLLGVYVMGFSGAMAHTGNLMNLTFCADNLINHFMCDILPLLELSCNSTFINELVIFIVVAFDIGVPIVTIFISYALILSSILRMHSTEGRSKAFSTYSSHLIVVCLFFGSGAFMYLKPPSILPLDQGKVSSLFYMIVVPMLNPLIYSLRNKDVKVALRKTLGKRILS

SEQ ID NO: 1546 - protein, 313 aa, Mus musculus
MLKSNTTFVTEFLFEGFSGFGWQHRLAFFAIFLALYFLTLSGNVIIVSIIHLDHHLHTPMYFFLAILSISDTCYTVTIIPRMLSDLLNPYHTIAFRDCVVQIFFYLTFGINNCFLLMVMGYDRYVAICNPLRYSVIMGRKACVHLASGSLGIGLGMAIVQVTSVFSLPFCDRFVIPHFFCDVRPLLKLACTDTTINEIINFVVSVFVLILPMGVVFISYVVIISTILKIASAEGRKKAFATCASHLTVVIIHYGCTAIIYMKPKSQSLLGQERLISVTYTLITPLLNPLVYTLRNKEVKDALRRAMWQKPLSS

SEQ ID NO: 1547 - protein, 313 aa, Mus musculus
MPKKNSTVVAEFLFEGFSSFDWQHRLGFFIVFLTLYLLTLSGNMIIVTIIRLDRHLHTPMYFFLSMLSISETFYTIAIIPRMLAGLLNPYQAIDIQGCATQLFFYLTFGINNCFLLTAMGYDRYVAICNPLRYSVIMGKKACILLASGSLGIGLSMAIVQVTSVFGLPFCDGFVIAHFFCDVRPLLKLACTDTTINEIINFIVSVCVLVLPMGLVFISYVVIISTILKIASAEGRKKAFATCASHLTVVIIHYGCASIIYLKPKSQTSLGQDRLISVTYTVITPLLNPVVYSLRNKEVKEALRKAIGRRPLSS

SEQ ID NO: 1548 - protein, 315 aa, Mus musculus
MDLTTWMNNYTTQSDFTLVGFFSQSKHSALLAVVIFVVFLMALSGNALLILLVLSDTHLHTPMYFFISQLSLMDMMYISVTVPKMLMDQVLGSHKISAAACGMQMFLYVTLAGSEFFLLAAMSYDRYVAICHPLRYPVLMNYRVCLLLMSVCWILGSLDGFMFTPVTMTFPFCGSREIHHFFCEVPAVTKLSCSDTWLYETLMYVCCVLMLLIPVTVISGSYTSILLTVLRMNSAEGRKKALATCSSHMTVVTLFYGAAIYTYIFPASLHTPEKDMVVSVFYTILTPLLNPLIYSFRNKNVTEAMKKLLVVSTLF

SEQ ID NO: 1549 - protein, 315 aa, Mus musculus
MGSEHWNYSTAGFVLTSLFNNSQTHLFLFSMVMLVYILAMAGNTAMVLLIWMDTRLHTPMYFLLSQLSFLDIFFTSVTVPKMIVGFLFGWTSISFGGCGAQMFFFMFLGAAECLLLALMAYDRYVAICNPLRYPVLMSRRVCLLMVVASWLGGSLNASIQTSLTLQFPYCGSRKISHFFCEVPSLLMLACADTEAYKQVLFVTGVVVLLVPITFITASYALILAAVLRMHSVEGRQKALATCSSHLTVVNLFYGPLVYTYMLPASYHSPGQDDVVSVFYTVLTPMLNPVIYSLRNKEVTGAMKKAMRRCGVNRNA

SEQ ID NO: 1550 - protein, 317 aa, Mus musculus
MAWAGNQTLISHFVLLGLFTHSPLHLFLFSIIMVMFLVALSGNGLMILLILMDSRLHTPMYFFLSWLSLMDLMLISTIVPRMAADFLLGRGSISFAGCGLQILFFLTLLGDECFLLAFMAYDRYVAISNPLRYSVIMSRRVCWLMVAGSWLFGLVDGLIQAVFTLRFPYCGSQEIDHFFCEVPAVLKLACADTSLYETMIYVCCVLMLLLPFSVISASYLRILVAVLRMRSAEGRRKAFATCSSHMIVVSLFYGAAMITYMRPQAYHSSKQDKVVSAFYTMITPMLNPLIYSLRNKEVTGALRKLLGKCPCGGGTLG

SEQ ID NO: 1551 - protein, 315 aa, Mus musculus
MGIWLNESSVDGFILLGIFSQSQTDLLLFSTVMLVFTVALCGNVLLILLIYTDPRLHTPMYFFLSQLSLMDLMLVCNIVPKMAVNFLSGRKSISFAGCGIQIGFFVSLVGSEGLLLGLMAYDRYVAISHPLHYPILMSQKVCLQIAGSSWAFGILDGIIQMVAAMSLPYCGSRYIDHFFCEVPALLKLACADTSLFDTLLFACCVFMLLLPFSIIVTSYARILGAVLRMHSAQSRKKALATCSSHLTAVSLFYGAAMFIYLRPRRYRAPSHDKVVSIFYTVLTPMLNPLIYSLRNREVMGALRKGLDRCRVGSQH

SEQ ID NO: 1552 - protein, 316 aa, Mus musculus
MPLNAQKTMENDSSVSEFILMGLTDQPELQLPLFVLFLVNYTVTVMGNLSLMNLICLNSNLHTPMYFFIFNLSFIDFCYSMVFTPKMLMGFVVEKNIISFRGCMTQLFFFLFFVNSESYVLTAMAYDRYVAICQPLLYKAVMSPGICFLLIFCTYLMGLVSALFHTGFMIRLNFCDSNVINHYMCDIFPLFRLSCSSTYLTELVSSAVVGTAIILCCLIILISYGMILYNIIHMSSGKGWSKALGTCGSHIITVSLFYVTGMLAYVKPSSAETVGQGKIFSVFYTFLVPMLNPLIYSLRNKDVKLAVKKTWKRLTC

SEQ ID NO: 1553 - protein, 316 aa, Mus musculus
MQVMKQMITESNSSVTEFILMGLTVQKELQLPLFVLFLLNYTATVVGNLSLMNLICLNSHLHTPMYFFIFNLSCIDFCYSFVCNPTMLTSFVSEQNTISYEGCMTQLFFFCFFVNSECYVLTAMAYDRYVAICHPLQYTTVMSPKICCLLVFGSYLMGFAGALTHTGFMIRLRFCNSNIINHYMCDIFPLLQLSCTSTYVNELVSSAVVGTIIILSSIIILVSYAMILSNILHMSSSKGWSKALGTCGSHIITVSLFYGSGLLAYIKPTSAETVDQGKFLSIFYTLVIPMLNPLIYSLRNKDVKLAVKRTMKRVTS

SEQ ID NO: 1554 - protein, 311 aa, Mus musculus
MGLENGSLVTEFILLGLTNDPDLQLPLFLLFLLIYTTTAVGNLALITLIALNSHLHTPMYFFLLNLSCIDLCYSSVITPKMLMNFLVRKNIISYMGCMTQLYFFCFFAICECCVLTSMAYDRYVAICNPLLYNITMSPKVCSYLMLGSYIMGFSGAMIHTGCILRLTFCDRNIINHYFCDLFPLLQLSCTSTYANEIEILIVGGKDIIVPSVIIFTSYGFILSNILQMRSTAGMSKAFSTCSSHILAVSLFFGSCAFMYLQPSSPGSMDQGKVSSVFYTIVVPMMNPLIYSFRNKDVKIALRKIFGQRRFS

SEQ ID NO: 1555 - protein, 310 aa, Mus musculus
MGVENGSLVTEFILQGLTSDPDLQLPLFLLFLLIYTTTALGNLSLITLIALNSHLHTPMYFFLLNLSFIDLCYSSVITPKMLMNFLVRKNFISYVGCMTQLYLFVFFAVSECCVLSSMAYDRYVAICNPLLYNIAMSPKVCSYLMLGSYIMGFSGAMIHTGWMLRLTFCDRSIINHYFCDLLPLLQLSCTNTYANEIEIIIVGGIDIIVPSIIIFTSYGFVLSNIFQMRSTDGRSKAFSTCSSHIVVVSLFFGSGAFMYLQPSSPESMDQGKRSSVFYTILVPMMNPLIYSLRNKDVKIALKKTFSTQSV

SEQ ID NO: 1556 - protein, 316 aa, Mus musculus
MRVMKQMVSESNYSVTEFIFMGLTVQREFQLPLFVLFLLNYTATVVGNLSLMNLICLNSHLHTPMYFFIFNLSCIDFCYSLVCNPTMLTSFVSEHNTISYAGCMSQLFLFCFFANSECYVLTAMAYDRYVAICHPLKYTTVMSPKICSLLVFGSYLMGFAGAMTHTGFMIRLSFCNSNIINHYMCDIFPLLQLSCTSTYVNELVSSAVVGTIIILSSLIILVSYAMILSNILHMSSSKGWSKALGTCGSHIITVSLFYGSGLLAYVKPSSAETVGQGKIFSVFYTLVVPMLNPLIYSLRNKDVKFAVKRTMKRVTS

SEQ ID NO: 1557 - protein, 313 aa, Mus musculus
MKQMATKNDSSVSEFILMGLTDQPELQLPLFFLFLLNHTVIVVGNLSLMSLIILNSNLHTPMYFFLFNLSFIDFCYSFVFTPKMLMSFVSEKNIIPFTGCMTQLFFFCFFAHSESWVLTVMAYDRYVAICKPLLYKAIMLPRICCLLMFVSYLIGFASAMVLAGLMIRLNFCNNNIINHYMCDIFPVLRISCSNTYLNELVSTAVVGTAIILCSLIIFISYAMILFNIIHMSSGKGWSKALGTCGSHIITVSFFYGSGLLAYVKPSSAETVGQGKFFSVFYTFLVPMLNPLIYSLRNKDVKVAVKKTIKRITS

SEQ ID NO: 1558 - protein, 317 aa, Mus musculus
MISMLAGNGSSVTEFVLAGLTDRPELQLPLFYLFLIIYIITVVGNLGLIILIGLNPHLHTPMYYFLFNLSFIDLCYSSVFSPKMLINFVSEKNSISYAGCMTQLFLFLFFVISECYMLTSMAYDRYVAICNPLLYKVTMSPQICSVISFAAYGMGFAGSSAHTGCMLRLTFCNVNVINHYLCDILPLLQLSCTSTYVNEVVVLIVVGINITVPSFTILISYVFILANILNIKSTQGRAKAFSTCSSHIMAISLFFGSAAFMYLKYSSGSMEQGKISSVFYTNVGPMLNPLIYSLRNKDVKVALRKSLIKFREKTDFN

SEQ ID NO: 1559 - protein, 313 aa, Mus musculus
MMQMTMENKSSVSEFILMGLTDQPELQLPLFVLFLMNYTATVMGNLSLMNLICLNSNLHTPMYFFIFNLSFIDFCYSMVFTPKMLMSFVVEKNTISFRGCMTQLFFFCVFINAESYVLTAMAYDRYVAIGQPLMYQVVMSPKICCLLIFGSYLMGFISATAHTGCMVRLRFCDSNIINHYMCDIFPLLQLSCSSTYVNELMSYIAVGTAIILCSLIILVSYAMILFNIIHISSGKGWSKALGTCGSHIITVSLFYGSGLLAYVNPSSAETVGQAKFFSVFYTLLVPMLNPLIYSLRNKDVKLAMKKSWKRITS

SEQ ID NO: 1560 - protein, 314 aa, Mus musculus
MRRLNTTPHHTNGFILVGFSEWPRLEMALLVVISIFYILTLLGNSAIIILSRLDPKLHTPMYFFLANLSFLDLCYTTSTVPQMLKNIQSHERSITYVGCIAQLFIFLSLGSTECVLLSVMAFDRYVAICQPLRYTVIMHPQLCQQLAAVAWITGFSNSLVQTVLTSLLPRCGQYQIENFFCEVPAMLQLSCVDTWVNEVEMYAAVVVIKVIPLGLILFSYINIVRAVIKIQSSEGRKKAFNTCGSHLLVVIMFYGSAISGYAYMAPKSSSAKLKGKLLALFYGLITPMLNPLIYTLRNKDVKAAVKKVLGREQE

SEQ ID NO: 1561 - protein, 313 aa, Mus musculus
MGQQNTTSLPGFILMGITQSTELQLPLFGVFFIIYAVTVMGNLGMIILTKLDSRLQTPMYFFIRHLAFIDLGNSTVICPKMLMDFVMDEKNISFYACATQMSFFVLFIISELFILSSMAYDCYVAICNPLLYSVIMSQRLCHVLVDIPYLYSTFQALLFTSKIFTLTFCGSNIISHFYCDAVYLLPTLCSNAEEIQLLIILFSALNLLSSLLIVLGLYVLILIAICRMHSAEGRRKAFSTCGSHLTVVVVFYGTLLFMYLQPKSTDSLENDKITSVFYTLVIPMINPLIYSLRNKEVKNAFNRALKNPFKINT

SEQ ID NO: 1562 - protein, 309 aa, Mus musculus
MKHSNDSKVTEFILLGFAGQNESWHILFVVFLVIYIATLVGNIGMILLIKLHSSLHTPMYFFLQHLAFVDLCYSSAITPRTLQNFVSTKPSISFTGCLAQLLVYGIFVTSDCFILAAMAVDRYVAICNPLRYPIIMSQRLCILLLLGSYTMGFLNATVNTGFTFLSNFCKSNVINHFFCDVPPILALSCSSIDLNIMVLTIFVGFNLTFTVSVVILSYTFILAAILRMSSASGRRKAFSTCASHMTAVTIFYGTLSYMYVLHGTNRSQEQEKVASVFYGIMIPMLNPLIYSLRNQDVIEALRHIGNKCF

SEQ ID NO: 1563 - protein, 311 aa, Mus musculus
MRNHTVTTFILLGLTDDQQLQVLIFIILFFTYSLSISGNLAIISLILVDPHLKTAMYYFLKNFAVLEISFTSASIPRYLYNIATGDKMITYNACVAQVFFTDLFGVTEFFLLAAMSYDRYVAICRPLHYLTIMSTTVCRRLVFCSWVAGLFILIPPLSLGLNLQFCDSNIIDHFICDASPLLKISCSDTWFMEQTVLICAVLTLIITLVCVVLSYVNIIKTVLRFPSAQQKKKAFSTCSSHMIVVSITYGSCIFIYIKPSAKDEVAINKGVTVLTTSIAPMLNPFIYTLRNRQVKQAFWDSIKRIIAFSKQ

SEQ ID NO: 1564 - protein, 312 aa, Mus musculus
MKNYTAITTFILVGLTNDANLQILLFIFLLLTYLLSVIGNLTIITLTLVDSHLKTPMYFFLRNFSLLEVSFTTVCIPRFLYTMASGDNTITYNACATQLFFVIVLGVTEFFLLTAMSYDRYVAICKPLHYTTIMSNRVCIQFLIGCYLMALIIVIPPYSISFKLEFCNSNVIDHFGCDAAPILKISCSNTEFIERFVLILAVLTLMFTLLCVVMSYTYIIRTILRFPSAQQRKKAFSTCSSHIIVVSITYGSCIFIYIKPSAKEGVAVNKVVSVLTTSVAPVMNPFIYTLRNKQVVQAFKDMIKRIASIIKS

SEQ ID NO: 1565 - protein, 311 aa, Mus musculus
MRNHTVTTFILLGLTEDPQIQSLLLIFLLLTYLLNITGNLTIILLTLIDPHLKTPMYFFLQNFSFLEILFTSACIPRYLYNLATGDKTITYGACASQAFFTDLFGVTEFFLLATMSYDRYVAICKPLHYTTIMSTACRRLLLCCWVAGVIIILPPFSLSQNLQFCDSNIIDSFLCDVSPFLKISCSDTWVIEQMVIGCAVLTFITTLFCVVLSYVYIIKTILKFPSAQQRKKAFSTCSSHMIVVSITYGSCIFIYVKPSAKDSVAINKGVIVLTTSIAPMLNPFIYTLRNKQVKQAFNDSIKKIALECQNG

SEQ ID NO: 1566 - protein, 309 aa, Mus musculus
MGDDNDTDITEFILLGFSGYGFLQGHLFWGVLCIYVVTLLGNSLIVLLTLADSALHSPMYFFLRHFSVVEILYTTTIVPRMLADLRSSCPTIPLASCFTQLYFFALFGIAECCLLTAMAYDRYAAICCPLHYTTLMSQGTYTGLVGASYLAGVISGTTHSIFIFTLPFRGAKTIHHFLCDILPVLRLATASTFWGEVGNLFVTITFIFAPFLLIVASYACILATILGVATSQGRQKLFSTCSSHLFVVILFFGTGTVAYMRPQADSFGDTDQIITLFYTVVTPMCNPFVYTLRNKEVTGAMRRLVKRYF

SEQ ID NO: 1567 - protein, 312 aa, Mus musculus
MGDDNDTDITEFILLGFSGYGFLQGHLFWGVLCIYVVTLLGNSLIVLLTLADSALHSPMYFFLRHFSVVEILYTTTIVPRMLADLRSSCPTIPLASCFTQLYFFALFGIAECCLLTAMAYDRYAAICCPLHYTTLMSQGTYTGLVGASYLAGVISGTTHSIFIFTLPFRGAKTIHHFLCDILPVLRLATASTFWGEVGNLFVTITFIFVPFLLIVASYACILVTILGVATSQGRQKLFSTCSSHLFVVILFFGTATVAYMRPQADSFGNTDQILTLVYTVVTPMCNPFVYSLRNKEVTGAMRRLMKRYLWGP

SEQ ID NO: 1568 - protein, 313 aa, Mus musculus
MGGTNQSSVSEFLLLGLSRQPQQQQQLIFLLFLIMYLATVLGNLLIILAISTDSRLHTPMYFFLSNLSFVDVCFSSTTVPKVLAIHILRNQAISFSGCLTQLYFLCVFADMDNFLLAVMAYDRFVAICHPLHYTTKMTHQLCAFLVVGSWMVASLNALLHTLLVAQLYFCGDNVIPHFFCEVTPLLKLSCSDTHLNELMILAVAGLIMLAPFVCILLSYILIACAILKISSTGRWKAFSTCGSHLAVVCLFYGTIISLYFNPSSSHSAGRDMAAAMMYTVVTPMMKPFIYSLRNRDMKGALRKVLTMRFISTQ

SEQ ID NO: 1569 - protein, 312 aa, Mus musculus
MEPENHTGIPEFYLLGLSENPEIQSVLFGLFLSLYLVTVFGNLLIILAIVSDPKLHTPMYLFLSNLSFSDICFTSTTVPKMLLGIQTQSKLITYAGCITQMYFFTVFGLLDNLLLTVMAYDRFVAICHPLHYTVLMNPKLCSQLLLLAWLISILGALPESLTALRLSFCAVVEIPHYFCELPEVLKLACSDTFINNVVLYIVTGIMGFFPLAGILFSYSQIVTSVLRISTVGGKYKAFSTCGSHLSVVSLFYGTCLGVYLSSIWTQASWAGVFASVLYTVVTPMMNPFIYSLRNRDMKRALNTLLCSVPSSS

SEQ ID NO: 1570 - protein, 319 aa, Mus musculus
MVQGNWTSVTVFVFLGFSHYPRIEVTVFVLCLLMYLITLLGNTILISITILDSHLHTPMYFFLSNLSFLDIWYTSSALTPMLANFVSGKNTISFSGCASQMYFSLAMGSTECVLLSMMAYDRYVAICNPLRYPIIMNRRVFVQIAGSSWVTGCLTALVETGPVIHLSLCGNSIINHFTCEILALLKMACGDTSMVQLIMLVISILLLPLPMLLICVSYASILSNILRISSMDGRSKAFSTCAAHLTVVVLFYGTALSMYLKPSSVNSQEIDKFMALIYAGLTPMLNPIIYSLRNKEVKMAVKKLLMRNPFSAILTSVLK

SEQ ID NO: 1571 - protein, 316 aa, Mus musculus
MEWENRTYLEEFFLKGLSGYPGLEHLFFVVILMMYAVILVGNGTLIILSIFDSHLHTPMYFFLGNLSFLDICFTTSSIPFTLVSFLSERKTISFLGCAVQMFLGLAMGTTECVLLGMMAFDRYVAICNPLRYPLIMSKSSYVTMATGSWFSGVANSAVQTAFVMRLPFCGNVINHFLCEILAVMKMACTDISGNEFIMLVATTLFTLMPLVLIVISYSLIISSILSIRSAEGRSKAFSTCSAHFTVVIIFYGTILFMYMKPKSKDKFDADDLDATDKLISMFYGVMTPLMNPLIYSLRNKDVKEAIKNLKGRLLGK

SEQ ID NO: 1572 - protein, 305 aa, Mus musculus
MENHTLLDEFILLGIPQTQGLETLLFVVFLFIYIFTLLGNLLIFTAIVSSSTLHTPMYFFLGLLSIFDMLFPSVTCPKMLLYLSGKSPAISYRGCIAQLFFYHFLGSTEGCLYSVMAYDRYVAICHPLRYMLIMKPGVCLGLVIVSWLIGCLQSGILTFFTFQLTYCGPNHVHHFFCDIPAVLPLACTDNKLARKVGSINVGFLALMLLFSVCVSYVHIGVAILRIRSAEGRQKAFFTCSAHLTAILCAYGPVIIIYLQRTPNPLLGAVVQILNNIVSPMLNSLIYSLRNKEVKRALRRVFHSLA

SEQ ID NO: 1573 - protein, 311 aa, Mus musculus
MSIRNHSTVTEFLLLGLTEEPALQLPLFCLFLGIYIVTMVGNLGMIAVIKLNSQLHTPMYYFLSSLSFLDFCYSSVVTPKMLVGFLSRDKAISYSDCMAQLFFFCIFVISECYMLAAMAYDRYVAICSPLLYAVIMSPRVCSLLVAAVFSVGFTDAVIHGGCILRLSFCKSNIIKHYFCDIVPLIQLSCSSTYIDELLIFVIGGFNMIATSLTIVISYGFILSSILRIHSKEGRSKAFSTCSSHLTAVLIFYGSLMSMYLKPASNGSVIHEKVTSVFYTTVIPMLNPLIYSLRNKEVKHALVKLVRRKISS

SEQ ID NO: 1574 - protein, 321 aa, Mus musculus
MVERMQYLNQSVVSQFFLEGLMYTAEHPGLFFLLFLLIYSITVSGNLLILLTVGSDPHLRSPMYHFLGHLSFLDACLSTVTVPKVMAGLLTLDGKVISFQGCALQLYCFHFLASTECFLYTVMAYDRYLAICQPLHYPVVMNKRVCAGLAGSTWAIGAMHSAIHTSLTFRLLYCGPQHIAYFFCDIPPVLKLACADTTINELVMLANIGVVAAGCLILIIISYAFIVAAVLRIRTAEGRQRAFSTCTAHLTVVLLYYMPPVCIYLQPSSTGAGAGAPAVFYTIVTPMLNPFIYTLRNKEVKRALRRLVCSSQESPASSPAP

SEQ ID NO: 1575 - protein, 308 aa, Mus musculus
MQGPNQTFVTEFILLGFSLSPRTTPLLFSAFLIIYLLIILGNGLIFILICLDSHLHTPMYFFIGVLSMLDLGYTTTTVPQMLAHLASQKKTISYSNCVAQMYIFLVLGVTESWLFAIMSIDRYVAICHPLRYKVIMSPCLCGVMAIFCGLCGVTAALVYTIFAMRLPYCGPNKINHFFCEVPAVLKLACADTSVNDHVDFILGFSVILIPLSLILVIYINIFTSILKIRSAQGRLKAFSTCASHITVVTMFCVPAMVMYMKPGSKASPEEDKKLALFYNVISAFLNPVIYSLRNKECEEGFPQGNRLW

SEQ ID NO: 1576 - protein, 315 aa, Mus musculus
MQGSSYENHSSVSEFILLGFSSNFQLNIILFNVFFFLYLSTLVGNGLIVTLIHLDSRLHTPMYFFLSVLSMLDMSYVTTTVPQMLVHLLCQKKTISYSGCVAQMYIFLVLGITEGWLFSVMAYDRYVAICHPLRYKVIMRPWLCGAMVVFCGLWGVSCSLIYTVFTMRLPYCGPNEINHFFCEVPAVLKLACADTSLNDRIDFILGFILLLVPLSFILASYVCIFATILRIRSAQGRLKAFSTCASHITVVTMFCGPAMFMYMNPGANASPERDKKLALFYNVISAFLNPIIYSLRNKDVKRAFLKVTGWGGATE

SEQ ID NO: 1577 - protein, 309 aa, Mus musculus
MANSTLVPEFLLEVFAETWELRILLTVLFLLMYLGSLLGNLIIIIATTVDHILNTPMYFFLRNLSILDMGYVSVTVPNACINSLTDHRSISLAGCAGQIFLVFFSACVEIQFLTIMAQDRYVAICKPLLYAMIMNHQFCVQMTLASLLTSLILASVHTSKTFQLSFCHSNVVSQFFCDIPSLLRLSCTDTFINKLLLLLTAIVFSGSCFTFIAISYVRILSTVLKVPVKGERGKAFSTCVPHIIVVSVFLSSGAYVYLKPSAISEIVEDMTLSVFYTIVPPFLNPIIYSLRNKQIKKAVKKVIFRFFIV

SEQ ID NO: 1578 - protein, 312 aa, Mus musculus
MEPSNRTAVSEFVLKGFSGYPALERLLFPLCSVMYLVTLLGNTAIVAVSMLDARLHTPMYFFLGNLSILDICYTSTFVPLMLVHLLSSRKTISFTGCAVQMCLSLSTGSTECLLLAVMAYDRYLAICQPLRYPVLMSHRLCLMLAGASWVLCLFKSVAETVIAMRLPFCGHHVIRHFTCEILAVLKLTCGDTSVSDAFLLVGAILLLPIPLTLICLSYMLILATILRVPSATGRSKAFSTCSAHLAVVLLFYSTIIFMYMKPKSKEARISDQVFTVLYAVVTPMLNPIIYSLRNKEVKEAARKAWGSRWACR

SEQ ID NO: 1579 - protein, 319 aa, Mus musculus
MERSNKTTPVSSFILLGLSAHPKLEKTFFVLILLMYLVILLGNVVLILVSILDSHLHTPMYFFLGNLSFLDICYTTSSVPLILDSFLTPRKTISFSGCAVQMFLSFAMGATECVLLGMMAFDRYVAICNPLRYPVVMSKAAYVPMAAGSWVSGSITATVQISLAMTLPFCGDNVINHFTCEILAVLKLACADISINVISMAVANAMFLGVPVLFIFVSYIFILSTILRIPSAEGRKKAFSTCSAHLTVVLVFYGTILFMYGKPKSKDPLGADKQDLADKLISLFYGVVTPMLNPIIYSLRNKDVKAAVTNLVGQKHFKW

SEQ ID NO: 1580 - protein, 318 aa, Mus musculus
MEGANQSTVAEFVLLGLSDHPKLEKTFFVLILLMYLVILLGNGVLILVSILDSHLHTPMYFFLGNLSFLDICYTTSSIPLVLDGFLTPRKTISFSGCAVQMFLSFAMGATECVLLGMMAFDRYVAICNPLRYPVVMNKSAYVPMAVSSWVAGGANSLVQISLAVQLPFCGDNVINHFTCEILAVLKLACADISINVISMGVANVIFLGVPVLFIFVSYIFILSTILRIPSAEGRKKAFSTCSAHLTVVLVFYGTILFMYGKPKSKDPLGADKQDVSDKLISLFYGVLTPMLNPIIYSLRNKDVKAAVRNLVGQKCLIQ

SEQ ID NO: 1581 - protein, 312 aa, Mus musculus
MDEENCSTVAQFILLGFSDVPELRGVLSLLFLLIYGVTALANLGMTALIQVSSQLHTPMYFFLSHLSFVDFCYSSVIVPKMLANIFNKDKAISFLACMVQFYLFCTCVVTEVFLLAVMAYDRFVAICNPLLYTATMSSDLRMILVSGCYLCASMCSLIHLCLALEIPSFKSNVINHFFCDLPPLLSLACSDVTVNKVLLFVVATFNESFSIVVIFTSYLFILITILRMRSVEGRRKAFSTCASHLTVIIVFHGTILSIYCSSTSDNSGDADKVATVFYTVVIPMLNPLIYSLRNKDVKGALRKVVNSKIYSQ

SEQ ID NO: 1582 - protein, 321 aa, Mus musculus
MLLTYGNNSGAMFILLSFSDYPEIEMPLFLVFLAIYSITVVGNIGMIVIIRINPKLHTPMYFFLSHLSFVDFCYSSVIAPKMLVNLFIKNRAISFLECIVQYFFFAIFVVTETILLVVMAYDRFVAICRPLLYTVAMSQKLCISLVVGSYAWGLICSLTMTCSIIQLSFVGINTIDHFFCEFSSLLVLSCSDTHVNQILLFSLSTVNALSTLLIILLSYMFILVTILKMQSSRGRQKAFYTCASHLTTITIFYGTILFLYSVPNSKNSQLTFKVASLFYTLVIPMLNPLIYSLRNKDVKDTVRQIMKIKFIALPHLSSKVR

SEQ ID NO: 1583 - protein, 308 aa, Mus musculus
MDEENITEVTEFILLGFTEDAVLQQVLFFIFLTIYIISLLGNITLISLICADSRLHTPMYFFIGNLSFLDLWYSSVYAPKILITCITEDKSISFAGCLAQFFFSAGLAYSECYLLAAMAYDRYVAISNPLLYFQAMSPRLRASLVAASYLGGFANSTIITSETFTLSFCRDNIIDDFFCDLPPLVKLACDVKESYQAVLYFILASNVITPTVLILASYLFIIVAILKIRSTQGRLKAFSTCGSHLTAVTLYYGSILFIYSRPSTSYALERDKVVSVFYTVVIPMLNPMIYSLRNKDVKDALRKMLDIV

SEQ ID NO: 1584 - protein, 313 aa, Mus musculus
MKEHNLTVMTEFILMGISDHSELQAPLFGLFLAIYMTSMVGNLGIIVLTTVDSRLQTPMYFFLRHLAITDLGYSTAVGPKMLENFVVDQNTISFNLCATQLAFFLVFIGSELFILSAMSYDRYVAICKPLLYTVLMSQKLCWVLMSMPYLYCTFVSLLITVKIFTSSFCGYNVINHFYCDCIPLLSLLCSHAEEIAFIVMIFAAFDLIVSLLIVLVSYMFILIAVLRMNSAEGRYKAFSTCGSHLTVVTVFYGTLIFMYVQPQSSHSDDNDKVSSIFYTLVIPMLNPLIYSLRNKDVKFALHRTWRNICKIFP

SEQ ID NO: 1585 - protein, 313 aa, Mus musculus
MEKNNLTAVTQFILMGITERPELQAPLFGLFLVIYLSSMFGNLGMIILTTVDSKLQTPMYFFIRHLAITDLGYSTAVGPKMLVNFVVDLNIISYNLCATQLAFFLVFIISELFILSAMSYDRYVAICKPLLYTVIMSQRVCQVLVAIPYLYCTFVSLLVTIKIFTLSFCGYNVISHFYCDSLPLLSLICSNTNEIEMIILVLAAFNLISSLLVVLVSYLFILIAILRMNSAEGRRKAFSTCGSHLTVVTVFYGTLIFMYVQPQSSHSFDTDKVASIFYTLIIPMLNPMIYSLRNKDVKYALQRSLKKIYSILS

SEQ ID NO: 1586 - protein, 308 aa, Mus musculus
MNPEFMLVGLTDSKEIQLVLSVLFLLIYMLTVLGNIGIILIIHLDVQLHTPMYFFLTHLSFLDLSYSTVITPKTLQNTLTSIKNISFMGCFTQLYFFAFLAGSECFILSSMAYDRYVAICNPLHYPVIMSPRRSYILITVSYIVGAIDSSATVFWLSTLDFCNSTVIHHFFCDTFPILALSCSDTYNAEATIFVLAGSTLLLSLITISASYVSILSTILKINSSSGKHKAFSTCASHLIGVTVFYGTTIFTYLKPSTSYSLGKDQVAPVFYTIVIPMLNPLIYSLRNKEVKSAVVRVMKKRECIQKLK

SEQ ID NO: 1587 - protein, 312 aa, Mus musculus
MRVWNHTGVKEFMLLGLTENPNCQVPLFLLFSIVYLIILVGNWGMIILIWLNAHLHTPMYFFLSNLSFCDICYSTVIAPKMLIDFLSEHKSSTFFGCVLQSFFFAVYITTEGILLSMMAYDRYVAIANPLMYTVIMTHRICSQMVLACYLGGLINSLTHTIGLLRLDFCGPNIVNHFFCDIPPLLKLACSDAHINEMLLLVFSGVIAIFTFIIVMVSYIHIIIAILRIRSAEGRRKAFSTCASHLTAVILFYGSVTFSYIQPSSQYSMEQEKVSAVFYTLVIPMLNPLIYSLRNKDVKEAAKKFIGRERRTS

SEQ ID NO: 1588 - protein, 315 aa, Mus musculus
MSACNHTNEPEFTLVGLTDSKEIQLVLSVLFLLIYMLTVLGNIGMILIIHLDVQLHTPMYFFLTHLSFLDLSYSTVITPKTLQNTLTSIKNISFMGCFTQLYFFVLLAASECFILSSMAYDRYVAICNPLHYPVIMSPRRSYTLITVSYMIGVLDSSVTVFCLSTLDFCNSKVIHHFFCDTFPILALSCSDTYNAEATIFVLAGSTLLLSLITISSSYVSILSTILKINSSSGKHKAFSTCASHLIGVTVFYGTMIFTYLKPSTSYSLGKDQVASVFYTIVIPMLNPLIYSLRNKEVKSAVVRVMKKRECIQKLE

SEQ ID NO: 1589 - protein, 313 aa, Mus musculus
MEKAVLINQTSVMSFRLTGLSTNPKVQMAIFFIFLIFYVLTLVGNILIVVTIIHDHRLHTPMYFFLSNLSFIDVCHSTVTVPKMLSDTFSEEKLISFDDCVVQIFFLHLFACTEIFLLTVMAYDRYVAICKPLRYMTIMNWKVCMVLGGAMWTAGTIHSISFTSLTIKLPYCGPNELDSFFCDVPQVIELACTDTRITEILVVSNSGMISMVCFVIIVVSYAVILVSLRQQISDGKRKALSTCAAHLTVVTLFLGHCIFIYSRPAISLPEDKIVSAFFTAITPLLNPIIYTFRNEDMKSALKKLIRRKEGKEK

SEQ ID NO: 1590 - protein, 318 aa, Mus musculus
MATSSTTLNYTNVRDIWYTMIGIPGLEYAHIWISIPICSMYIVAIAGNALLLFLIITERSLHEPMYLFLSMLALADIFLSTVTTPKMLAIFWFRAGGISFASCVSQMFFLHFIFVAESAILLAMAFDRYVAICYPLRYTTILTTSVIIKMGIAAVIRSFFICFPLIFLVYRLTYCGKSTIRHSYCEHMGIARLACDSIKVNIYYGVIVALFSTCLDAVLIIVSYALILCAVFRIPSRDARLKALGTCGSHVCVILLFYTPAFFSFFAHRFGGHSIPLHVHILLANLYVVVPPSVNPIIYGVKTKQIQERVIQVFSLGK

SEQ ID NO: 1591 - protein, 316 aa, Mus musculus
MLGWSNGTYNESYTSFLLMGFPGMQEARALLVLPFLSLYLVILFTNALVIHTVASQRSLHQPMYLLIALLLAVNICAATTVLPPMLFSFSTRFNRISLPRCLGQMFCIYFLVSMDCNILLVMALDRYVAICYPLRYPEIVTGQLLAGLVVLAVTRSTSIVAPVVVLASRVRFCRSDVIRHFACEHMALMKLSCGDISLNKTAGLIIRTFNRVLDMLLLGTSYSRIIHAAFRISSGGARSKALNTCGSHLLVIFTVYSSTMSSSIVYRVARTASQDVHNLLSAFYLLLPCLVNPIIYGARTKEIRQHLVRSFLSAGP

SEQ ID NO: 1592 - protein, 319 aa, Mus musculus
MEMTNDSMLTEFLLVGLSDHPKLQTVLFVLVLCMYLMILLGNGVLIAVVIHDIRLHTPMYFFLCNLSFLDICYTSSSVPLILSSFLTVRKRVSFSECMIQMFFSFAMGATECVLLGTMALDRFMAICYPLRYPVIMSKDTYVPMAAGCWVAGLVDSVVQTSLAVQLPFCTNNVIHHFVCEILGILELACADISINVISLTGSNLLFLAVPLLVIAVSYMFIIATILRIPSAEGKRKAFSTCSAHLTVVIIFYGTIFSMYAKPKSKDTAGAGHQSVMEALISLFYGVMTPMLNPLIYSLRNKDVKAAVQNMLGRKTLSKM

SEQ ID NO: 1593 - protein, 314 aa, Mus musculus
MKFTEIRAEDNASTVTEFLLLGFSDLPNLQGILFGMFSIIYLIILVGNSFIIVITRIDPALQKPMYFFLANFSSLEICYVSVTLPRILFSIATQERKISVLSCATQLCFFLMLAATECFLLAVMSYDRYVAICNPLHYPLVMNPTKCTQLAAASWLGGIPVQIGQTCQIFSLHFCNSTQINHFLCDIPPILKLACGDTSINELSVYLVAILFAAVPFMLILASYGKIIATILKLPTATGRAKAFSTCSSHLLVVFLFFGSATITYLRPKSTHSPGTDKLFSLFYSIVTPMLNPLIYSLRNKEVIAALRKLLRIK

SEQ ID NO: 1594 - protein, 314 aa, Mus musculus
MKFTEIRAEDNASTGTEFLLLGFSDLPNLQEILFGLFSIIYLIILIGNSFIIVITRIDPALQKPMYFFLANFSSLEICYVSVTLPRILFNIATQDRSISVVSCATQMCFFLMLGATECFLLAVMSYDRYVAICNPLHYPLVMNPTKCTQLAAASWLGGIPVQIGQTCQIFSLHFCNSNQIDHFFCDLPPILKLACGDTSIHELSVYLVAMLFVAFPFLLILASYTKIIATILKLPTATGRAKAFSTCSSHLLVVFLFFGSATITYLRPKSTHSPGTDKLLSLFYTIVTPMFNPLIYSLRNKEVIAALRKLLHIK

SEQ ID NO: 1595 - protein, 308 aa, Mus musculus
MEKKNCSSVDEFIFLGITKNPDMRVTFFTTLLLVYLINLLANLGMIILIRVNTQLHTPMYFFLSHLSFCDLCYSTAIGPKMLVDLLVEEKSIPIVGCALQFFTFCIFADSECLLLAVMAYDRYQAISNPLLYTVNMSSRLCSLLMAGVYLVGTADALIHTTLTFRLCFCGSNEINHFFCDVPPLLLISCSDTEVNELAIFTIFGFIELSTISGVLVSYCYIISSVLKIGSAEGRFKAFSTCASHLTAVAVFQGTMLFMYFRPSSAYSLDQDKMTSLFYTLVIPMLNPLIYSLRNKDVKEAVVKLKNKW

SEQ ID NO: 1596 - protein, 314 aa, Mus musculus
MENSTSVDEFLLLGLTSVQKLQPIIFVMFLTIYLLNLVGNGVILMIVTLERRLHSPMYFFLGNLSCLDICYSSVTLPKVLINLLSRRRAISFLGCITQLYFFHFLGSTEAILLAVMAFDRFVAICSPLRYTAIMNPQLCILLAATAWFTSFFYALLHSVMTAHLNFCHSHKLSHFFCDVKPLLEVACGNTVLNQWLLSVVTGSISMGAFLLILLSYFYIIAFLLFKNRSCRMLKKALSTCTSHFMVVCLFYGPVGFTYIRPATASASSMSEDRVVAIIYSAVTPVLNPLIYTLRNKEVMLALKKNFGKKLFKGN

SEQ ID NO: 1597 - protein, 308 aa, Mus musculus
MSNQTSVTEFLLLGVTDIQELNPILFVIFFTIYFINITGNGAILMIVILDPRLHSPMYFFLGNLACLDISYSTVTVPKLLQNLLSTSKAISFLGCITQLHFFHFLGSTETMLLPVMAFDRFVAICRPLHYSVIMNHQLCIHMTVTIWTLGFFHALLHSVMTSRLSFCGPNHVHHFFCDIKPLLDLACGNTELNLWLLNTVTGTIALTSFFLIFLSYFYIITNLLLKTRSCSMLHKALSTCASHFMVVVLFYAPVLFTYIRPASGSSLDQDTIIAIMYSVVTPALNPLIYTLRNKEVRSALNRKVRRWL

SEQ ID NO: 1598 - protein, 313 aa, Mus musculus
MLNQTSVTEFILLGVRDIQEPQPFLFAIFFTIYFVNITGNGAILMIVILDPRLHSPMYFFLGNLACLDISYSTVTVPKMLENLLSTNKAISLLGCITQLHFFHFLGTTESLLLAVMAFDRFVAICRPLHYSVIMNWQVCILMAVTIWTIAFLHALLHSVMTSRLSFCGLNHIHHFFCDVKPLLELACGNTELNLWLLNTVTGTIASVPFFLTFLSYFYIITYLFLKTRSCSMLHKALSTCASHFMVVVLFYAPVLFTYIRPTSGSSLDQDRIIAIMYSVVTPALNPLIYTLRNKEVRSALNRKVRRCLLLEEI

SEQ ID NO: 1599 - protein, 312 aa, Mus musculus
MALINKSHPEEFILLGFADRPWLELPLFIILLVTYPTAMIGNIAIILVSILDPCLHSPMYFFLTNLSFLDMCYTTSIVPQMLTNLGSSTKTISYMRCVVQLYFFHIMGGTECVLLALMSFDRYVAICKPLHYTLIMNQRNCILLVSTVWLTGISYAVSEATVTLQLPLCGHNKLDHLVCEIPILIKTACGEKETNELALSVVCIFLLAVPLCLILASYASIGHAVFKIKSSEGRKKAFGTCSSHLIVVLLFYGPAISMYLQPPSSITKDQPKFMALFYGVVTPTLNPFIYTLRNKDVKGALGNLFKNIFMSK

SEQ ID NO: 1600 - protein, 312 aa, Mus musculus
MILINKSHPEEFILLGFADRPWLELPLFIILLVTYPTAMIGNIAIILVSILDPCLHSPMYFFLTNLSFLDMCYTTSIVPQMLINLWGSTKTISYMRCAVQLYFFHTMGGTECVLLALMSFDRYVAICKPLHYTLIMNQRNCVLLVSTVWLTGIFYAVSEATVTLQLPLCGHNKMDHLVCEIPILIKTACGEKETNELALSVVCIFLLAIPLCLILASYASIGHAVFKIKSSEGRKKAFGTCSSHLIVVLLFYGPAISMYLQPPSSITKDQPKFMALFYGVVTPTLNPFIYTLRNKDVKGALGKLFRNIFISK

SEQ ID NO: 1601 - protein, 314 aa, Mus musculus
MDDMTSGNYCTVTEFFLAGLSEKPELQLPLFFLFIGIYMITVAGNLGMIILIGLSSHLHTPMYYFLSSLSFIDFCQSTVVTPKMLVNFVTEKNIISYPGCMTQLYFFLIFAIAECYILAAMAYDRYVAICNPLLYNVTMSYQIYISLISGVYIIGVICASAHTGFMVRIRFCKLDVINHYFCDLLPLLKLACSNTYINEMLILFFGTLNIFVPILTIITSYIFIIASILRIRSTEGRSKAFSTCSSHILAVAVFFGSLAFMYLQPSSVSSMDQGKVSSVFYTIVVPMLNPLIYSLRNKDVAVALKKIIERKTFM

SEQ ID NO: 1602 - protein, 305 aa, Mus musculus
MAAGNRCTVTEFFLVGLSEKSELQLPLFLLFTGIYLITVAGNLGMITLIGLSSHLHTPMYYFLSSLSFIDFCQSTVVIPKMLMSFLTEKNIISYSGCMAQLYFFLIFGIAECYTLAAMAYDRYVAICNPLLYNVTMSYQIYSSLISGIYIFAVFCSSLNTGFMLRTQFCNLDVINHYFCDLLPLLNLASSNTFIIEILILVIATLNVFIPVLTIITSYIFIIATILCIHSREGKFKAFSTCSSHISAVAIFYGSGAFTYLQPSSLNSMGQAKVSSVFYTTVVPMLNPLIYSLRNKGCQYFIEENT

SEQ ID NO: 1603 - protein, 310 aa, Mus musculus
MRNCTLVTEFILVGIPYTAGLERMLFVLFLSFYLLTLPGNLLILMAILTSASLHTPMYFFLGNLSVLDIFFPSVSSPKMMLSLTGHSHTISYQGCASQLFFYHFLGCAECFLYTVMAYDRFAAICHPLRYTVIMSSWVCGSMAVATWMGSCLHASVLTFLIFKLPYCGPNEVDNFFCDIPVVLPLACADTSLAQAVSFINVGLVALVCFLLILISYSRIVISILKIRSSEGRRRAFSTCSAHLTSILLFYGPVVLIYLRPASSPWLDSVVQVLNNIVTPSLNPLIYSLRNKEVKVALRKALTQGMRVPGE

SEQ ID NO: 1604 - protein, 315 aa, Mus musculus
MTPGMVSENNSSVKEFILLGLTQLPELQLPLFFLFLGIYVFSMVGNLGLIVLIVLNPPLHTPMYYFLFNLSFTDLCYSSVITPKMLVGFVKQNIISHAECMTQLFFFAFFVIDECCILTAMAYDRYAAICKPLLYKVIMSHQVCFVLMVGGYTVGFVGATAHTVCMLRLTFCDGNIINHYMCDIPPLLKLSCTSTSINELVVFIVVGVSIIVPSLTVFISYTLILSNILRIHSAKGRSKALSTCSSHMIAVSLFFGSSSFIYFKSSPVGSVDKDKISTVFYTVVVPMMNPFIYSLRNKDVQIALRKTLKKNCSLK

SEQ ID NO: 1605 - protein, 311 aa, Mus musculus
MLKGNLSEVTEFILAGLTNKPELQLPLFFLFLAIYVVTVVGNLGMITLILFSSQLHTPMYFFLSSLSFIDLCQSTVIIPKMLVNFVTVKNIISYPECMTQLYFFVTFAIAECHMLAVMAYDRYVAIGNPLLYNIMMSYRVCSWMIFGVYIMAFIGATSHTVCMLRVHFCKTDVINHYFCDIYPLLELSCSDTFINEVVLLCFSVFNFLIPTLTILSSYIFIIASILRIKSTEGRYKAFSTCSSHISAVAIFFGSTAFMYLQPSSVNSMDQGKVSSVFYSIVVPMLNPLIYSLRNKDVKVALNKFFERKFFL

SEQ ID NO: 1606 - protein, 311 aa, Mus musculus
MGKENHTELSQFLLLGLSDDPKLQPILFGIFLFMYLVTVLGNLLIILAVSSDSHLHNPMYFFLSNLSFVDMCFTSTTVPKMLVNIQTKNKNISYMQCLTQVYFFMVFAGMDNFLLTVMAFDRFVAICHPLNYTVIMNPHFCCFLVLMCWIIILSVSLFHSLLMKQLTFSMGTEIPHFFCELAQILRVASSDILINNIALYVATALLCVFPVTGILFSYSQIVSSLLNMSSVVSKYRAFSTCGSHLCVVCLFYGTALGVYLSSAGTDVSQGSTIASVMYTVVTPMLNPFIYSLRNKDVKGALVRILKVYSCP

SEQ ID NO: 1607 - protein, 317 aa, Mus musculus
MDKNNQTFVSEFLLLGLAGYPKTEIIYFVIVLVMYLVILTGNGVLIIASIFDSRLHTPMYFFLGNLSFLDICYTTSSVPSTLVSLISKKRNISFSGCAVQMFFGFAMGSTECLLLGMMAFDRYVAICNPLRYSIIMSKEVYVFMASASWFSGSINSVVQTSLAMRLPFCGNNVINHFTCEVLAVLKLACADISLNIITMVISNMAFLVLPLLVIFFSYLFILHTILRMNSATGRRKAFSTCSAHLTVVIIFYGTIFSMYAKPKSQDLTGQDKFQTSDKIISLFYGVVTPMLNPIIYSLRNKDVKAAVKYILKQKYVP

SEQ ID NO: 1608 - protein, 311 aa, Mus musculus
MECKRNISEFLLMGLSSKRNIEVFCFLFFSFCYLAILCGNLLILISIRCSSLFNQPMYYFLSHLSSMDIFYTSCVTPKLIGDLLVRRKTISYTNCMLQVFAMHFFGMIEILILTAMAFDRCVAICKPLHYMVIMSRSRCHILIWASWVGGAAHSLSQFCLLICLPFCGPNEIDHYYCDIFPLLKVACTDTTITGVLVVANSGLIALVTFVVLFGSYVVILFTLRNYSAEGRHKALSTCASHITVVILFFGPSIFAYLRPPTTFPEDKIFALFYTIIAPMFNPLIYTLRNTEMKKAMKKVWCQNMFSEEKHS

SEQ ID NO: 1609 - protein, 314 aa, Mus musculus
MLGLNGTPFQPATLQLTGIPGMNIGQAWIALIFCFLYFISIAGNLSILALVIREPPLHQPMYYFLSMLSLNDLGVSLSTLPTVLATFCFNYRHVDFDACLVQMFFIHTFSFMESGILLAMSFDRFVAICDPLRYSTVLTNSRILAMGLGILAKSFTTLFPFPFLVKRLPFCKGNVLHHSYCLHPDLMKVACGDIHVNNIYGLFVVIFTYGVDSVFILLSYALILRAVLVIASHEQRLKALNTCISHICAVLAFYVPIIAVSMIHRFWKSAPAVVHVMMSNVYLFVPPMLNPIIYSVKTKEIRKGMLKVFHKSQT

SEQ ID NO: 1610 - protein, 314 aa, Mus musculus
MAGNATHHIASFFLVGIPGLENFHCWIGIPVCLLFALTLLGNSIILTTVKLEPSLHQPMYFFLCMLAMNDMCLTCSTALKMLGIFWFDEHWINFDACLTQMFFIHTLCIMESAILVAMAFDRFVAICIPLHYTSILTMPMVIKIGLVGLGRAILMIMPCPLLIKRLLYYTKYVIHHAYCEHMAVVKMASGNTQVNRIYGILVALSVTIFDLGLIVTSYIKILQAVFRLSSQNARSKALGTCVAHVCTILAFYTPALFSFLTHRFGKNVPASIHIIFAILYLLVSPTVNPLVYGAKTKQIRDRVVSLLFSQKQKF

SEQ ID NO: 1611 - protein, 308 aa, Mus musculus
MLIFNHSSFMTFTLLGVPGLESQHLWLSVPFTSMLLAILIGNGAILFLVITEPTLHTPMYLLLALLMVADLISTLALVPKVLCLFWFDDRVIAIYACFTQMFFIHGASVVRSALLVAMAFDRFVAVCEPLRYNTILSHSLVGRLGLVALAKGVILILPMPLLLQRLTFCHRVIPHTYCDHMAVVKMACSNTRPNRIYGLFVILLVVGLNLLLIGFSYVFILQSVVRLNSRDATFKALNTCSAHLFVILITYVPALFSSITHRIGHHIPPHAHIILANLYLLIPSVFNPIIYGIKMKEIRDRVAKCLCR

SEQ ID NO: 1612 - protein, 308 aa, Mus musculus
MTNFTHVSEFILLGFKGGPGIQMLLFLIFLFLYVIAVVGNFGMIIIIRMDAHLHTPMYAFLQSLSFLDICYSSTIAPRALINCMKQDHTISFSGCATQFFFLSLFGTTEAFLLAAMAYDRFIAICNPLLYSVSMSHWVCGLLVSGSYSWGAVNAVTQTTMTFTLTFCGSNEINDFFCDVPPLLSLSCSDTFINQLVLLALCGSIIVSTFLTVFVSYIYIISTILKIRTVQGRQKAFSTCASHLIGVCLFFGTVFFMYAQPSAVSSMEQSKVVSIFYTIVIPMLNPLIYSLRNKDVKQALKRSKQRFCS

SEQ ID NO: 1613 - protein, 311 aa, Mus musculus
MQNQSFVTEFIILGLSQNPIVEKILFFVLLLVYLATIGGNIIIVVTIMYSPALLGSPMYFFLAFLSFLDLCVSSTVTPKMIVDFFYEKKTISFGCCMMQLFSVHFFSGTEMIVLAAMAYDRYVAICKPLHYFSILTRRLCSILVAISWAGGFLHSIIQVIFTLQLPLCGPNVIDHYTCDLFPLLKLACTDTHIFVLLVFANSGAICIIIFSLLLVSYGVILFSLRAHSSEGRRKALSTCGAHVTVVVLFLVPCILIYARDTSAFSFEKHTLLFVNVLTPLLNPTVYTFRNKEMINAIRKMCKRLKMIFVRF

SEQ ID NO: 1614 - protein, 320 aa, Mus musculus
MEEVNCTFMAEFILLGFSDVPELAIFLFLVFLVIYGVTVIANLGMTVLIQVSSQLHTPMYFFLSHLSFVDFCYASIIVPKMFTDIINQDQVISYLECMLQFYLFCTFAITEVFLLAVMAYDRFVAICNPLLYTVIMSPKLRLVLVSCCYLYASVCSLIHLCLALEITSFKSNVINHFFCDLPPLLSLACSDVSTNEFFLFIIVNFNEILTIVIIFTSYLFILITILKMRSAEGRRKAFSTCASHLTVIMVFHGTILFIYCQPNSGNSLDVDKVTTVFYTVIIPMLNPLIYSLRNKDVKEALRKMLGSKKNSLLDFFFFCF

SEQ ID NO: 1615 - protein, 318 aa, Mus musculus
MILSEKNNSGIIFTLLGFSDYPDLKVPLFLVFLVIYSITVVGNIGMILVIRINPQLHSPMYFFLSHLSFVDFCYSSIIAPKMLVNLVAKDITISFVECIVQYFLFCVFVVTEAFLLVVMAYDRFVAICNPLLYTVAMSQKLCITLVVGSYAWGFTCSLTLTCSTVQLSFHGVNRIDHFFCELSSLLALSSSDTLISQLLLFVFATFNAVSTLLLILLSYLFIVVTVLKMRSASGRRKAFSTCASHLAAITIFHGTILFLFCVPNSKNSRLTVKVGSVFYTVVIPMLNPIIYSLRNKDVQDTIRKIMTLISCVKNDRHN

SEQ ID NO: 1616 - protein, 317 aa, Mus musculus
MKIYRRMTHGNYSLVTEFILEGLTNRPELQMPLFFLFLGIYVVTIVANLGLITLISLNTHLHTPMYYFLFNLSFVDICYSSVFTPKMLINFVVEKNTISYTGCLTQLYFFCFFVITECYLLTAMAYDRYVAICKPLLYNVILSPRICAVFVFGAYVMGCWGSLAHTLCMARLTFCDANLVNHYLCDILPVLQLSCTSTYNNEVVVFVLVGMNIVVSTSTTFISYGFIIANILRISSTQDRAKAFNTCSSHIMTVSLFFGAAAFMYMQPSDVESMDKGKVASVFYTNVGPMLNPLIYSLRNKDVKVALKKTLKRKLFS

SEQ ID NO: 1617 - protein, 308 aa, Mus musculus
MNHSSVTDFILEGLTKRPELQLPLFLLFLGIHVITVVGNLGMILLINISSQLHSPMYYFLSHLSFIDLCYSSVITPKMLVNFVCAKNTISFKECMTQLYFFLLLAISEGYLLTAMAYDRYVAICSPLLYNTVMSHKVCSIMMAVVYSLGFFGATVHTTRMTMLSFCGSHIIRHYFCDILPLLTLSCSSTHINEVLLFIIGGVNTLAPTLAVIISYAFILTSILRIRSNEGRSKAFGTCSSHIMAVGIFFGSITFMYFKPPSSNNMEQEKVSSVFYTTVIPMLNPLIYSLRNKDVKTALKKMVGRRQLS

SEQ ID NO: 1618 - protein, 316 aa, Mus musculus
MPGVNTSSLTPRYFILNGIPGLEAAHIWISLPFFIMYLIAVTGNCGLIYLISHEEALHRPMYYFLAMLSATDISGCNTIVPSMLCIFWFSVKEIDFNACLVQMFFIHMLTGMESGVLMLMALDRYVAICYPLRYTTILTNTMITKIGLAALVRSVLLMVPFAFLIKRLPYCRGNLIQHTYCDHMAVAKLSCGNIKINAIYGLIIAIFIGGFDIFCISMSYAMIIHAVVKLSSADARHKAFSTCTSHICAIVITYVPAFFNFFTHRFGRTTIPHHIHIIIANLYLLLPPTLNPIVYGVKTKQIREGVIKLFARQKVV

SEQ ID NO: 1619 - protein, 313 aa, Mus musculus
MYNLSCYNPASFTLVGIPGLEKFHIWIGIPFCVIYVVAIVGNCILLYLIAVEQSLHEPMFIFLSMLASTDLILSTATVPKLLSNLWFGSQEITFSGCLTQMFFLHFSFVVDSAILLAMAFDRYVAICLPLRYSTILTPQVIVKIMVSIIVRSFSVILPDVFLLRRLPFCKTRVIPHTYCEHIGVARLSSADISINIWYGFSVPLMTVISDVILIAVSYIFILRAVFLLSSQGARQKALSTCGSHICVILMFYTPAFFSILAHRFGHSVPRNVLILFANFYVAIPPALNPVVYGVKTKQIQDKFLLFFSLRKTQ

SEQ ID NO: 1620 - protein, 313 aa, Mus musculus
MTALSVTNYTSSRFALTGFPGLEIYYFWISVPFFIIYVTVFLGNCMVLHVIRTELSLHQPMFYFLAMLALTDLCMGLSTVHTVMGILWGFLQEISLDACIAQSYFIHGLSFMESSVLLTMSFDRYIAICNPLRYSSILTNDRILKIGVAILCRSSMLIPPVIIRLKFLNYCRPHFLSHSFCLHQDLIRMACGDIRFNSIYGLALVISNLLVDSVLILISYIMILYTVLSIASREERIKSLQTCVSHISAVLVFYIPIIGLTMVHRFGKHLSPLVHVLMGNVYILFPPLMNPIIYSIKTQQIRVRIQRLFLKGT

SEQ ID NO: 1621 - protein, 310 aa, Mus musculus
MVVTNGSLVTEFILLGLTDNPDLQIPLFLVFLVMYMITAFGNLTLILLTVLNSHLHTPMYFFLFNLSFIDLCYSSVVTPKLLMNFVLKKNIIGFAGCMTQLYFFCFFVISECYVLTAMAYDRYVAICNPLMYNVTMSPKVCSYLMLGSYLMGFSDAMIHTGCILRLTFCDGNTINHYFCDLLPLMQLSCTSTYINEVEIFIVGGKDITVPSIVIIISYGFILSNILQIKSTGGRSKAFNTCSSHIIAVSLFFGSCAFMYLKPPSAGSLNEGKVSSVFYTIVVPMMNPLIYSLRNKDVKLALRKTLSRRKF

SEQ ID NO: 1622 - protein, 310 aa, Mus musculus
MVLTNHSLVTEFILLGLTDNPDLQIPLFLVFLVMYMITAFGNLTLIFLTVLNSHLHTPMYFFLFNLSFIDLCYSSVVTPKLLMNFVLKKNIIGFAGCMTQLYFFCFFVISECYVLTAMAYDRYVAICNPLMYNVTMSPKVCSYLMLGSYLMGFSDAMIHTGCILRLTFCDGNTINHYFCDLLPLMQLSCTSTYINEVEIFIVGGKDITVPSIVVFISYGFILSNILQIKSTGGRYKAFNTCSSHIIAVSLFFGSCAFMYLKPSSVGSLNEGKVSSVFYTIVVPMMNPLIYSLRNKDVKLALRKTLSRKKF

SEQ ID NO: 1623 - protein, 311 aa, Mus musculus
MENYTRVKELIFLGLTQSQEVSMVLFLFLLLVYVTTLLGNLLIMVTVTCESRLHTPMYFLLRNLSVADICFSSITAPKVLVDLLSDRKTISFNGCLTQMFFFHLIGGVDVFSLSVMALDRYVAISKPLHYVTIMSRGRCIGLIVASWVGGFAHSIVQISLLLTLPFCGPNVLDTFYCDVPQVIKLACTDIFVLELLMISNNGLVATLWFVLLVVSYTVILMMLRSHSGEGRKKAISTCTSHITVVTLHFVPCIYVYARPFTALPTDKAISVTFTVISPLLNPLIYTLRNQEMKSAMRRLRKRLEPFDREEQ

SEQ ID NO: 1624 - protein, 314 aa, Mus musculus
MGKSNNVTEFILLGLTQDPAGRKALFVMFLLIYIVTMVGNLLIVETVISSPSLDSPMYFFLASLSLMDAVYSTAFSPKLIMDLLCNRRTISVSACIGQLFVEHLFGGAEVFLLVFMAYDRYVAICKPLHYMTIMNRQVCILLLVAACAGGFGHSLVQVIVVCYLPFCGPNTIDHFICDMYPLLGLACTDTYLIGLTVVANGGAICMTVFILLLVSYGIILNSLKSHSEEGRRKALSTCSSHIIVVVLFFVPCIFMYVRPVSNFPIDKSLTVVYTVITPMLNPLIYTLRNAEMKNSMKKLWCERLTMERLRMFPH

SEQ ID NO: 1625 - protein, 312 aa, Mus musculus
MAVTNESHPKEFILLGFANHPWLELPLFVTLLITYPMALMGNIAIILVSTLDPRLHSPMYFFLTNLSFLDMCYTTSIVPQMLFNLGSSRKTITYIGCVVQLYVFHIMGGTECLLLAIMSFDRYVAICKPLHYTLIMNQRVCILLVSIMWLTGVIFAFSEATLTLQLPLCGIHKLDHLLCEIPVLIKTACGEKESNELALSVVCIFILAVPLCLILASYVNIGCAVLRIKSSEGRKKAFGTCSSHLVVVSLFYGPAISMYLQPSSSITRDQPKFMALFYAVITPTLNPFIYTLRNKDVKGALKKLLRSIFSSK

SEQ ID NO: 1626 - protein, 313 aa, Mus musculus
MMQITMENKSSVSEFILMGLTDQPELQLPLFVLFLMNYTATVMGNLTLMNLICLNSNLHTPMYFFLFNLSFIDFCYSMVFTPKMLMSFILEKNTISFGGCMAQLFFFLFFVNSESYVLTAMAYDRYVAICKPLTYKVIMSPKICCLLIFSSYLMGFASAMAHTGCMIRLSFCDSNIINHYMCDIFPLLPLSCSSTYVNELMSSVVVGSAIILCCLIILISYAMILFNIIHMSSGKGWSKALGTCGSHIITVSLFYGSGLLAYVKPSSAKTVGQGKFFSVFYTLLVPMLNPLIYSLRNKDVKLAVKKTWKRITS

SEQ ID NO: 1627 - protein, 310 aa, Mus musculus
MALENASLVTEFILMGLTNRPDLQIPLFLLFLVMYVIATLGNLALIMLIILNSHLHTPMYFFLLNLSCIDLFYCSVITPKMLMNFVLKKNVISYEGCMAQFYFFAFFAISECYVLTTMAYDRYVAICNPLLYNIVMSPKLCSYLMMGTYLMGFSGAMIHTGCILRLTFCDKNTINHYFCDILPLLQISCTSTYVNEIELFIVAGKDIIVPTVIIFTSYGFILSSILKISSTAGMSKAFSTCSSHIIALCLFFGSCTFMYLKPSSVESMDQGKISSVFYNIVVPLMNPLIYSLRNKDVKIAIKKTITIGKF

SEQ ID NO: 1628 - protein, 310 aa, Mus musculus
MGFENGSSVTEFILVGLTKESDLQCPLFILFLMMYVVTVLGNQGLISLIGLNSHLHTPMYFFLFNLSFVDLWYSSVFTPKMLESFISEKNTISYRGCMAQLFFFCFFSISECYILTSMAYDRYVAICNPLLYNIVMSPKLCLILMFSSYMMAFSGAMAHTGCMLRLTFCDANTINHYFCDILPVMQLSCTSTYVNELEVFVVVGINIIVPTITIFISYGFIISSIFRISSKEGRSKAFSTCSSHIIAVSLFFGSGAFMYLKPSSAESMNEGKISSIFYTNTVPLLNPLIYSLRNKDVKDALIKTLSKRKR

SEQ ID NO: 1629 - protein, 311 aa, Mus musculus
MAFGNRSFVTEFILIGLTDQPNLQLPLFFLFLVMYIVTMTGNLGLVILIGLNSHLHTPMYFFLFNLSLIDLCYSSVFTPKMLLNFILNKNIISYTGCMTQLYFYSFFVISECYVLMSMAYDRYVAICNPLLYNIAMTPKICSYLMLGSYLMAFSGAMAHTGCMLRLTFCDANTINHYFCDILPVMQLSCTSTYVNELEVFIVVGINILVPSITIFISYGFILSSIFHINSNEGRSKAFSTCSSHIIAVSLFFGSGAFMYLKPSSAGSMDEGKISSVFYTNVVPMMNPLIYSLRNKDVKVALRITLSRWKLL

SEQ ID NO: 1630 - protein, 309 aa, Mus musculus
MDSVNVSLVTEFLLVGLTHQPDLQIPLFLLFLAMYLVTALGNLGLIILVLLNSHLHTPMYFFLFNLSFIDFCYSSVFAPKMLMNFILRQNAISYMQCMTQLYFFFFFVVSECFVLTSMAYDRYVAICNPFLYNVMISPQVCLNLMIGSYLMAFSEAVVLTVCMLTLTFCDGNINHYFCDILALFQLSCSSTYVNKLVAYVIVVINILFSTPAIFISYGFILSSIFRISSSKGRSKAFSTCSSHIIAVSLFFGSRAFVYFKPSSPGSMEWAKISSVFYTNVVPMMNPLIYSLKNKDVKIALRKSLARWKI

SEQ ID NO: 1631 - protein, 310 aa, Mus musculus
MAPANVSLVTEFILVGLTNQPDLQIPLFFVFLIMYIVTALGNLCLIILIVLNSHLHTPMYFFLFNLSFIDLCYSTVFTPKMLMNFILSKNAISYMGCLTQLYFFCFFVISECYVLTSMAYDRYVAICNPLLYTVAMSPKLCLNLMLGTYAMAFSGAMAHTGCMLRLTFCDANTINHYFCDILPVMQLSCTSTYVNELVVFIVVGINIIVPSITIFISYGFILSSIFHIKSNEGRSKAFSTCSSHIIAVCLFFGSGAFMYLKPSSSSSMDQGKTSSVFYTNVVPMMNPLIYSLRNKDVKIALRKTLSRWKF

SEQ ID NO: 1632 - protein, 310 aa, Mus musculus
MEKAVLINETSVMSFRLTGLSTNPLVQMAVFFIFLIFYVLTLVGNILIVITIIYDRRLHTPMYFFLSNLSFIDVCHSTVTVPKMLSDTFSEEKLISFDACVVQMFFLHLFACTEIFLLTVMAYDRYVAICKPLQYMTIMNWKVCMMLAAALWTGGTIHSISLTSLTIKLPYCGPDEIDNFFCDVPQVIKLACTDTHIIEILIVSNSGLISVVCFVVLVVSYAVILVSLRQQISDGKRKALSTCAAHLTVVTLFLGHCIFIYSRPSTSLPEDKVVSVFFTAVTPLLNPIIYTLRNEDMKSALNKLIKRREK

SEQ ID NO: 1633 - protein, 308 aa, Mus musculus
MGALNQTRVTEFIFLGLTDNWVLEILFFVPFTVTYMLTLLGNFLIVVTIVFTPRLHNPMYFFLSNLSFIDICHSSVTVPKMLEGLLLERKTISFDNCIAQLFFLHLFACSEIFLLTIMAYDRYVAICIPLHYSNVMNMKVCVQLVFALWLGGTIHSLVQTFLTIRLPYCGPNIIDSYFCDVPPVIKLACTDTYLTGILIVSNSGTISLVCFLALVTSYTVILFSLRKKSAEGRRKALSTCSAHFMVVTLFFGPCIFLYTRPDSSFSIDKVVSVFYTVVTPLLNPLIYTLRNEEVKTAMKHLRQRRICS

SEQ ID NO: 1634 - protein, 314 aa, Mus musculus
MSQKRMAPRNSSSVTEFILVGFSNQPALQLPLFFVFLGIYVLTVIGNLGLITLIGLNSSLHTPMYFFLFNLSFIDFCYSCVFTPKMLSDFVSENIISYMGCMTQLFFFCFFVNSECYVLVSMAYDRYVAICNPLLYTVTMSPQVCTLLMFCSYVIGFAGAMAHTGSMLTLTFCDSNMIHHYLCEVLPLLQLSCTSTYANELVFFIVVGVVITASSISIFISYALILSNILKIPSAEGRSKAFGTCGSHVVAVALFFGSGAFTYLTTSFPGSMEEGRFASVFYTNVVPMLNPLIYSLRNKDVKLALNKTLKRVLF

SEQ ID NO: 1635 - protein, 316 aa, Mus musculus
MAKNNITTVTEFILIGFNDHPKWEIPLLLVFLSFYLVTMLGNLGMVILIHVDVQLHIPMYFFLSHLSVLDACYTSVITPQILATLATGKTVISYRCCAAQFFFFTICAATECFLLSVMAYDRYVAISNPLLYTVAMGPRKCWSLVVGAYICGVCGAILRTTCTFSLSFCENNQINFFFCDLPPLLKLACSDTTNIEIIIVFFGNFVILANALVILISYLLIIKAVMRMKSSGRRAKTFSTCVSHLTAVALLFGTLIFMYIRSGSKKSLDEDKVVSVFYTVVIPMLNPLIYSLRNKDVKAAFKKVTGKCQVSQCTQH

SEQ ID NO: 1636 - protein, 314 aa, Mus musculus
MDNNNLTTVTEFILVGFTDHPEWEVPLFLVFLCFYLVTILGNLGMVILIQMDVQLQSPMYFFLSHLSVLDACYTSVITPQILAMLATGKTVISYNHCAAQFFFFTFCASTECFLLAVMSYDRYVAISNPLLYTVAMSPKKCWSLVLVAYVCGLSGSIQRTTCTFSLSFCEDNKINFFFCDLPPLLKLACSDTTNAEIIIVLFGNFVILVNALVILTSYLLIIKTVMRIKSSGGRGKTFSTCVSHLTAVALFFGTLTFMYIRSGSGKSPEEDKVVSVFYTVIIPMLNPLIYSLRNKDVKAGFRKLTSRLQVSQSV

SEQ ID NO: 1637 - protein, 310 aa, Mus musculus
MKNQSGELEFILLGLTDDPQLQILIFLFLFFNYILSMMGNLTIILLTLLDPHLKTPMYFFLRNFSFIEIAFTTVCIPRFLISILSGDRTISYNACAAQLFFVFLLGSTEFYLLAAMSYDRYVAICRPLHYPIIMNSKVCHLLVLSSWVTGFLIIFPPLLLGLKLDFCTSGAMDHFLCDPSPVLQLSCTDTQLIELMTFVLAIMTLIITLILVILSYTLIIKTILKFPSAQQRRKAFSTCSSHMVVVSITYGSCIFMYVKTSAKERVTLNKGVAVLNTSVAPLLNPFIYTLRNQQVKDAFKHMLHRFCTKQ

SEQ ID NO: 1638 - protein, 306 aa, Mus musculus
MSNVTEFILLGLTQDPDLQKLLFIVCLIIYLITLAGNMLISVTIFISPALATPMYFFLSYLSIIDGFYSSSIAPKMIYDLISEKSTISFNGCMTQLFAEHFFAADEIILLIAMAYDRYVAICKPLHYMTIMSQPLCVFLVGAAVILGFIHGAIQTLFMAQLPFCGPNTINHFMCDLIPLLELACTDTHTLGPLIAANSGSLCLLTFSMLVASYVVILRSLRNHSAEGRRKALSTCASHVTVVVLFFVPCSYLYLRPMTSFPTDKAVTVFCTLVTPMLNPLIYTLRNEEVKRVMKKLWGRMRKAGDM

SEQ ID NO: 1639 - protein, 305 aa, Mus musculus
MVHENNVTELIFTGLFQDPEVQKVCFVLFLPVYLATLLGNGLIFVTVSISKTLHSPMYFFLSSLSLVEICYSSTVAPKFITDLLAKVKTISLKGCLTQIFFFHFFGVVEIILLVMMAYDRYVAICKPLHYMIIMSRQVCHMLVAGSWLGGLIHSIIQIIITIPLPFCGPNVIDHYFCDLHPLLKLACSDTFMERFIVMANSGLFSIISLFILVSSYAVILISLRKRSAEGRRKALSTCASHITVVILYFGPGAFIYMRPSSAFTEDKLVSVFYTVITPMLNPIVYTLRNTEMKNAIRMFWSQKDK

SEQ ID NO: 1640 - protein, 314 aa, Mus musculus
MGERNNVTEFVLLGLTQDPAGQKVLFVMFLLIYIVTMVGNLLIVLTVIASPSLGSPMYFFLACLSFLDIVYSTSISPKLIMDLLCDEKSISFTACMSQLFIEHLFGGTEIVILVAMAYDRYVAICKPLHYLTIMNRKVCIILLGFSWVGGFTHSMIQILFVFNLPFCGPNIIDHFMCDMSPLLGLVCTDTYFIGLTLIAKGGAMCIVVFILLIVSYGIILRSLKNYSQEGRRKALSTCSSHIMVVTLFFVPCIFMYARPVYNFSSDKYITVFYTVFTPMLNPLIYTLRNSEMKNSMQKLWCTLLTMDRIRLSCY

SEQ ID NO: 1641 - protein, 307 aa, Mus musculus
MGQNNNVTEFILLGLTQDPAGQKVLFVMFLLIYIVKIVGNLLIVGTVIASPSLGSPMYFFLAFLSLMDAVYSTAILPKLLTDLLCDKKTISFTACLVQLFVEHLFGGSEVFILVVMAYDHYVAICKPLHYLTIMKRQVCILLVVVSWAGGFVHALLQAISVYLLPFCGPNVIDHFACDIYPLLGLACTDTYFLGLTVVSSYGAMSIVAFILLLVSYGIILNSLKTHSQEGRRKALSTCSSHIMVVVLFFVPCIFMYVRPVSNFPIDKYITVFYTVFTPMLNPLIYTLRNMEIKNCMAKLWSKMFTKA

SEQ ID NO: 1642 - protein, 315 aa, Mus musculus
MGQRNNVTEFILLGLTQDPAGQKALFVMFLLIYIVTMVGNLLIVATVIASPSLGSPMYFFLAYLSIMDAVYSTSTSPKLIMDLLSDKKTISFSACMGQLFIEHLFGGAEVFLLVVMAYDRYVAICKPLHYLTIMNRQICILLLVIAWVGGFVHSVIQLAFVSTLPFCGPNVIDHFICDMYPLLTLACSDTYFIGLTVVANGGAICMVILILLLISYVFILNSLKNYSQEGRRKALSTCSSHITVVVLFFVPCIFIYVRPVSNFPIDKSISVVFTVITPMLNPLIYTLRNSEMKIAMQKLWCKTATTGRVRVHSPH

SEQ ID NO: 1643 - protein, 305 aa, Mus musculus
MENANNVTEFILVSITKIPELRILFSALFLIMYVATLLGNLLIIVTVTVSPNLRSPMYFFLISLSLLDVIYSSVTAPKLIVDSLSENTTISLEGCMTQLFAEHFFGGVEIILLIVMAYDSYVAICKPLHYTTIVSPRVCWLMVGGAWVGGFAHGTIQLLFMYQIPFCGPNVIDHVICDLFPLLQLACMDTHILALLVILNSGVMCVTIFLILITSYVVILCSLKSSSSEGRRKALSTCSSHFTVVVLFFVPCIILYMRPVVTYPIDNAMALCATIFEPMLNPLIYSLRNAEVKHALRKLWMKRGP

SEQ ID NO: 1644 - protein, 307 aa, Mus musculus
MGEKSNITEFILLGLTQDPAGRKILFFIFLLIYIVTMVGNLLIVVTVITSPSLGSPMYFFLASLSLLDALFSTAISPKLIVDLFCDQKTISFTACISQLFIEHLFGGVDIVILVAMAYDRYVAICKPLHYLAIMNRRVCITLLIIAWTGGFTHSLIQIVFVYNLPFCGPNVIDHFICDMSPLLVLACTDTYFIGLTVIANGGAMCIVIFTLLLGSYGIILKSLKTHSQEGRRKALSTCSSHILVVILFFVPCIFMYARPVYNFPIDKCITVFYTIITPMLNPLIYTLRNSEMKTCMKKLWCKILPAD

SEQ ID NO: 1645 - protein, 310 aa, Mus musculus
MALINGSVVTEFILLGLTDQPDLQVPLFLVFLLMYMITALGNLTLIILIVLNSHLHTPMYFFLFNLSFVDFCYSSVIIPKMLMNFILKKNFISYVGCMTQFYLFGFCVILECYILTSMAYDRYVAICNPLLYNIVMSPKLCSYLMLGSYLMGFSGAMIHTGCVLRLSFCDGNIINHYFCDLLPLLQLSCTSTYVNEIEVLIVAGKDIIVPTVIIFISYGFILSSIFQMKSTKGMSKAFSTCSSHIIAVSLFFGSGAFMYLKPNSTGTMNNGKIPSIIYTILIPMMNPLIYSLRNKDVKVALRKTLRKKIL

SEQ ID NO: 1646 - protein, 316 aa, Mus musculus
MALANGSFVTEFILLGLTDQPDLQMPLFLIFLIIYLITAFGNLTLIILIVLNSHLHTPMYFFLFNLSFIDLCYSSLITPKMLMNFVLEKNIISYMGCMTQFYFFGFFAISECYVLTAMAYDRYVAICNPLLYSVAMSPKMCSYLILGSYFMGFSGAMIHTGCVMRLTFCDGNTINHYFCDLLPLLQLSCTSTYVNEIELFIVTGKDIIVPTVIIFASYGFILSNILKIRSTSGRSKAFSTCSSHIIAVSMFFGSSAFMYLKPSSAVSMNEAKFSSIFYSIVVPMMNPLIYSLRNKDVKVGLKKTLSRMFSHNLISL

SEQ ID NO: 1647 - protein, 310 aa, Mus musculus
MGSENGSSVTEFILVGLTKDPDLQCPLFVLFLVMYVLTVLGNLSLITLIVLNSHLPTPMYFFLFNLSLVDFWYSSVFTPKMLMSFISEKNIISYRGCMAQLFFFSFFCISECYVLTVMAYDRYVAICNPLLYNIVMSPKLCLNLILGSYIMAFSGAMAHTGCMLRLTFCDANTINHYFCDIHPLLQLSCTSIYVNELEVFVVIGINIIVPTITIFISYGFILSSIFHISSKEGRSKAFSTCSSHIIAVSLFFGSGAFMYLKPSSAESMNESKVSSVFYTNTVPLLNPLIYSLRNKDVKIALIKTLSKRKC

SEQ ID NO: 1648 - protein, 310 aa, Mus musculus
MDSVNISLVTEFILVGLTDKPYLQIPLFFIFLAMYLVTALGNLSLIILTVLNSHLHTPMYFFLFNLSFVDFCYSSVFTPQMLMNFITRKNTISYMECMSQLYFFCFFVISECYVLTSMAYDRYVAICKPLLYNLVMSSKLCLNLMLVSYFIAFSESVAHTVCIMRLNFCDANKINHYFCDIPPLLQLSCTTTYINKLVVFVASSINIIVPISTIFISYGFILSSIFHIHSSEGRSKAFSTCSSHIIAAFLFFGSGAFMYFQPSSAESMDEGKISSVFYTNVIPMMNPLLYSLRNKDIKVALRKTLSKRNI

SEQ ID NO: 1649 - protein, 308 aa, Mus musculus
MGTGNHSAAVVFVLVGLTQQPELLLPLFILFLGIYVVTAVGNLGMILLITVSPLLHTPMYYFLSSLSCVDLCYSTVITPKMLVNFLGKKNVIVYSECMAQLFFFVIFVVAEGYLLTAMAYDRYVAICRPLLYNVIMSSRLCSLLVLVAFILGFVSALAHTSAMMNLSFCKSHIISHYFCDVLPLLNLSCSNTHLNELLLFIIGGFNTLVPTLAVAISYVFIFCSILHIKSSKGRSKSFGTCSSHLMAVGIFFGSITFMYFKPSSSNSLEQEKVSSVFYTTVIPMLNPLIYSLRNKDVKKALGRFFVGR

SEQ ID NO: 1650 - protein, 313 aa, Mus musculus
MALVNGSTVTEFILLGLTDQPGLQMPLFLLFLLMYMITVFGNLTLIFLILLNSHLHTPMYFFLLNLSFVDLCYSSVITPKMLMNFILKKNLISYMGCMSQLYFFCFFIISECYVLVSMAYDRYVAICNPLLYNTAMSPRVCSYLMLGSYLMGFFDAMIHTGCMLRLSFCDGNIINHYFCDVLPLLQLSCTSTYVNETEIFIVGGKDIILPSAIIFFSYGFILSNIFQIRSTLGRSKAFSTCSSHIIAVSLFFGSCGFMYLKPSSAVSIDQGKISSIFYTIVVPMMNPLIYSLRNKDVKVALRKTLSRRKFLKV

SEQ ID NO: 1651 - protein, 311 aa, Mus musculus
MDTKNISFITEFILVGLTEYTETHFPFFFLFLGIYAITVAGNLGLLTLIGMNSPLHTPMYYFLFNLSFIDLCYSTVITPKLLVNFVSERNTISYEGCMTQLYFYCFFVSAECYVLTVMAYDRYVAICKPLLYTVTMSPQVCSLLTLIVYVGAFIGAWAHTGCMMRLTFCKDNTVNHYMCDILPLLELSCSSTYINELVVFIVVGFDVGVPSITIVVSYTFILSSILHIRSTEGRSKAFSTCSSHIIVVSVFFGSGAFMYLHPSSVLSMDQGKVSTVFYTIVVPMLNPLIYSFRNKEVKIALRKTLRMKISS

SEQ ID NO: 1652 - protein, 315 aa, Mus musculus
MMQANQTQVTEFILLGLSDDPHTQKLLFILFLGIYMVTVLGNLLLMFLVRADSRLHTPMYFFLCNLSLADLCFSTNIVPQALIHLLSRKKTISFRRCAAQLLLFLIFGCTQCALLAVMSYDRYVAICNPLHYSSIMTWRVCIQLATVSWTSGILVSVVDTTFTLRLPYRGSNSIAHFFCEAPALLALASTDTQTSEMAIFLMGVVILLIPVSLILVSYGHIIVTVVKMKSAAGRFKAFSTCGSHLMVVILFYGSAIITYMTPKSSKEQEKLVSVFYAMVTPMLNPLIYSLRNKDVKGALWKVAMKNFSSRLRITH

SEQ ID NO: 1653 - protein, 309 aa, Mus musculus
MGIENTTLLTEFVLTGLSHLPQWKIPLFLLFLVIYLITIVGNLGLITLIWNDPHLHIPMYFFLGSLAFVDTWLSSTVTPKMLLDIFSKSKLISFSECMIQFFSFGISATTECFLLASMAYDRYVAICKPLLYPVIMTNRLCVRLLTLSFVGGFIHVLIHESFLFRLTFCNSNIIHHFYCDVMPLLKISCNDPSLNYLMLFIFSGSIQVFSILTILISYTLVLFSILKQKSLKSIKKAFSTCGAHLLSVSLYYGSLLFMYVRPASPQVDDQDMMDSIFYTVIIPVLNPIIYSLRNKQVKNSLEKFLKRNT

SEQ ID NO: 1654 - protein, 308 aa, Mus musculus
MGYGNLTEFILLGLFHNEDVKAICAVLFLLCYLAILCGNLVVLLTIKGSQLSEQPMYFFLSYLSFMDVCFTSTVAPKFIIGLLVQCNTISYNGCIAQMFYAHFFGATEIFILVVMAYDRYVAICRPLYYMITMSRQVCYILVIGSVFGAFIHSLVHVLVIIRLPFCGSNEIDHYFCDIFPLLKLACTDTRLLVIVIITTTGVMSILTFVALVISYIIILSILRTRSSESRRKALSTCGSHITVVFMFFLPLIFTYVPMGDSVGDDKVFALFYTMIAPLFNPLIYTLRNTDMKNAMRKVWCQDKLFEGK

SEQ ID NO: 1655 - protein, 318 aa, Mus musculus
MKNQSLEVVFVLLGLTGDPQLQILIFLFLFFNYILSLMGNLVIILLTLLDPHLKTPMYFFLRNFSFLEIAFTTVCIPRFLTSILLGEKMILYNACVAQLFFFFLLGATEFYLLAAMSYDRYVAICRPLHYPIIMNSKVCHLLVLSSWVTGFFVILPPLLLGLKLDFCASKTVDHFLCDTSVLQLSCTDTRLIELMAFALAIMTLIITLILVLFSYTLIIKTILKFPSAQQRKKAFSTCSSHMVVVSITYGSCIFMYVKTSAKERVTLNKGIAVLNTSVAPLLNPFIYTLRNQQVKEAFKNVIHRFCSFKNHETRFRHQ

SEQ ID NO: 1656 - protein, 310 aa, Mus musculus
MRNHTTVTVFILLGLTDDLQLQVVVFVLLFLTYMLSVTGNLTIITLTLLDSHLKTPMYFFLRNFSFLEISFTTVCIPKFLVSMATGDKTISYNECAAQLFFTILLGATEFFLLAAMSYDRYVAICKPLHYMTIMSSKICNLLVFVSWLSGFLIIFPPLLMGLQLDFCAANTVDHFFCDVSPILQLSCTDTHIIELMMLLSAILTLLVTLVLVSLSYTNIIRTILRIPSSQQRRKAFSTCSSHMVVVSISYGSCIFMYVKPSAKERVALNKGIALLSTSVAPMLNPFIYTLRNKQVKDAFKNMTKRWSFYQ

SEQ ID NO: 1657 - protein, 310 aa, Mus musculus
MEAENHTTVAELIILGLTEDPKLCIVFFVIFLGVYIVTLVGNISIITLIRISSQLHTPMYLFLSHLAFVDILYSTSVSVIMHMELLGHGLALPVAACAAQLCITVSFGSAECFLLAAMAYDRYVAICSPLLYSTLMSPRVCFLLLGMSYVGGCMNGWTFTGCLLSLSFCGPNQIDHFFCDFSPLLKLSCSDVSIIGIIPSISSGSIIVVTVFVIAVSYIYILITILNMRSTEGRHKAFSTCTSHLTAVTLYYGTITFIYVMPKSNYSTEQNKVLSVFYTVVIPMLNPLIYSLRNRDVKEALRKATVRVYS

SEQ ID NO: 1658 - protein, 310 aa, Mus musculus
MEAENHTTVAELIILGLTEDPKLCIVFFVIFLGVYIITLVGNISIITLIRISSQLHTPMYLFLSHLAFVDIVFSTSVSVIMLMELLGHGLVLSVATCAAQLCMTVSFGSAECFLLAAMAYDRYVAICSPLLYSTLMSSRVCFLLLGISYVGGFVNGWTFTGCVLSLSFCGPTQINHFFCDFSPLLKVSCSDVSIIGIIPSISSGSIIVVTVFVIAVSYIYILITILKMRSTEGRHKAFSTCTSHLTAVTLFYGTITVIYVMPKSSYSTEQNKVISLFYTVVIPMLNPLIYSLRNRDVKDALRKAIVRVYS

SEQ ID NO: 1659 - protein, 310 aa, Mus musculus
MEPGNYTVVTEVILLGFTEDAIIRAILFIVFLIIYSVTLMGNASIIMLIRRSPQLHTPMYLLLSHLAFVDIGYSSSVTPIMLKGFLRKETFILVSGCVAQLCSVVTFGSTECFLLAAMAYDRYVAICSPLLYATQMSSTVCILLVGASYLGGCVNAWTFTGCLLNLSFCRPNKVNHFFCDYSPLLKISCSHDFSSEVIPAISSGSIIVVTVFIIALSYVYILVSILKMRSTEGRQKAFSTCTSHLTAVTLFYGTITFIYVMPKSSYSTDQNKVVSVFYTVVIPMLNPIIYSLRNKDVKEAMKKLMANTHH

SEQ ID NO: 1660 - protein, 306 aa, Mus musculus
MMNKNNVTEFILLGVTRDPELRKILSVLFLIMYMATVFGNLLIVVTITRSPSLRSPMYFFLLSLSLMDVTYSSVIAPKLIMDSLSERTIVSFERCMTQLFAEHFFGGVGIILLIVMAYDRYVAICKPLHYVKMMTPRVCCLMVGGAWVGGSMHATIQLLFMYQIPFCSSNIIDHFMCDLFPLLKLACMDTHILGLLVILNSGVMCVSIFLILIASYMVILCSLKSYSSEGRRKALSTCSSHFAVVVLFFVPCIFLYMRPVVTFPIDKAMAVSFTIVEPMLNPLIYTLRNTEVKYAIKNMCRKQGSH

SEQ ID NO: 1661 - protein, 315 aa, Mus musculus
MQHQVNQSTGVVFVFVGFSEYPNLQVPLFLIFLIIYTITVLENLGMILVIRINAKLHTPMYFFLSHLSIVDLCYTTVIAPKLLDLLITEDRSMSLKGCIIQFYFGCACVVTQNFMLAVMAYDRFVAICNPLLYTVAMSQKLCALLVTGTYLWGGLCATTLTYFLLALSYCRSSIINHFCCEYSAIISAACSDSSISQIACLLICMFNEICSLLIIIVSYVVIFTTVIKIPTKGALQKALSTCAPHLTAISFCHGIILLLYCVLKSKSSLLLVKIVTVFYSMVIPMLNPLIYSLRNKDVKETVRKLIHMKILSQSL

SEQ ID NO: 1662 - protein, 312 aa, Mus musculus
MGIWNHTSVKEFILIGLTENPNWQVPLFFLFCIVYFIILVGNWGMIILIWLNAQLHTPMYFFLSNLSFCDICYSTIIAPKMLINFLSEHKSTRLFACILQSFFFAVYVTTEVIFLSMMAYDRYVAIANPLMYTVIMTNNICTQMVLASYLGGLINSMIHTIGLLKLDFCGPNIVNHFFCDVPPLLKLACSDAHINEMLLLVFSGVFAISTFIIVMVSYIHIIIAILRIRSAEGRRKAFSTCASHLTAVALFYGSLTFNYIQPSSQYSMEQEKLSAVFYTLVIPMLNPLIYSLRNKDVKEAAKKLICGERNAP

SEQ ID NO: 1663 - protein, 312 aa, Mus musculus
MAIWNHTGVSEFILVGLTENPNWQVPLFLLFSVVYFIILVGNWGMIILIWLNAQLHTPMYFFLSNLSFCDICYSTIIAPKMLLNFLSEHKSSTFFACILQSFFFAVYVTTEVILLSMMAYDRYVAIANPLMYTVIMTHNICTQMVLASYLGGLINSMIHTIGLLKLDFCGPNIVNHFFCDVPPLLKLACSDAHINEMLLLVFSGMIAIFTFIIIMVSYIHIIIAILRIRSAEGRRKAFSTCASHLTAVTLFYGSLTFNYIQPSSQYSMEQEKLSAMFYTLVIPMLNPLIYSLRNKDVKEAAKRLICRESSTS

SEQ ID NO: 1664 - protein, 312 aa, Mus musculus
MNTLNYTFKPDFILMGLTDSKEVQLVLSVLFLLIYLVTVLGNIGMILIIRLDVQLHTPMYFFLTHLSFLDLSYSTVITPKTLENLLTSTKNISFMGCFTQMYFFVLLAATECFLLSSMAYDRYVAICKPLHYSVIMSKRFCSALLTGSYVFGAVDSTVNMLCMGTLDFCNSNVIHDFFCDTSPLIALSCSNTHDIEFIIFIFAGSTLLLSLITISASYLSILSTILKISSTSGKQKAFSTCASHILAVTIFYGTMIFTHLKSNKSFSLGKDQVASVFYTIVIPMLNPLIYSLRNKEVKCAIDRIIKKREKGL

SEQ ID NO: 1665 - protein, 310 aa, Mus musculus
MTENNFTKVTVFMFSGFSDHPELQVSLFLIFLFIYLFTVWGNIGLILLIRIDSQLHTPMYFFLSNLAFIDIFYSSTVTPKALVDFQSTQKSISFVGCFVQMYFFVGLVCSECFLLGSMAYDRYVAICNPLLYSVIMSQKVCNWLAVIPYMIGFTNSLISICVISSLPLCDPYINHFFCDTTALLALSCVDAFSTELVIFVLAGFTLLSSLLIITFTYVTIISAILRIQSAAGRWKAFSTCASHLTGVTVFYGSLIFTYLQPDNTSSLTQAQVASVFYTIVIPMLNPLIYSLRNKDVKNALLRVIHRKHLL

SEQ ID NO: 1666 - protein, 312 aa, Mus musculus
MDPGNHTVVKEFILLGLTENPDWQIPLFLLFSIIYLIIFVGNWLMIFLIWLNAHLHTPMYFFLSNLSFCDICYSTVIAPKMLINIVSEHKSSRLLSCVLQSFFFMVYATTEVILLSMMAYDRYVAIANPLMYTVIMTFSICISMVLACYLCGIINSLTHTISLLRLDFCGPNIVNHFFCDVPPLLKLSCSDAHINEMLLLVFSGVIAIFTFIIVMVSYIHIIIAILKIRSTEGRRKAFSTCASHLTAVTLFYGSGTFSYIQPSSQYSMEQEKVSAVFYTLVIPMLNPLIYSLRNKDVKEAAKKLICGWSNTS

SEQ ID NO: 1667 - protein, 305 aa, Mus musculus
MVSEFILWGLSSSQRIEVLLFMVFSMLYLLIVSGNIVILVLITTDPHLHSPMYFLLANLSFIDMWLSSVTTPKMITDFLRENKTISFAGCMSQVFFAHCIAAGEMVLLVIMAYDRYVAICKPLHYFTIMNMKRCTGLVFTSWTTGFVHALSHLVVIVELPFCGPKEIDSFFCDMPLVIKLACIDSRDLDVLMNADCGLVAVTCFILLLISYTYILITVCQSSKAGASKAMNTCTAHITVVLIFFVPCIFIYVWPLSIIWLDKFLAVFYSVFTPLLNPAIYTLRNKEMKNAMKKFINSYLSHKGNL

SEQ ID NO: 1668 - protein, 309 aa, Mus musculus
MKNKTSLTEFILLGLTDVPELQVAVFTFLFLAYVFSMIGNLTILILTLLDSHLHTPMYFFLRNFSFLEISFTNIFIPRVLVSITTGNKSISFAGCFAQYFFAIFLGATEFYLLAAMSYDRYVAICKPLHYMAIMSNRVCTHLVLCSWLGGLMAIIPPITLMSQQNFCASNRLNHYFCDFEPLLELSCSDTSLIEKVVFLVASVTLVVTLMLVTLSYTFIIKTILKLPSAQQRTKAFSTCSSHMIVISLSYGSCFFMYVKPSAKVGGTFDKGVALLITSVAPLLNPFIYTLRNQQVKQAFKDTVKKLVNL

SEQ ID NO: 1669 - protein, 310 aa, Mus musculus
MKRANCTEVREFVFQGFSNFQEHQLTLFIIFFALYILTLTGNVIIVTIIRIDHHLHTPMYFFLSVLSTSETFYSLVIIPRMLGSLVGLSQTISLECCGTQLFFFLGFGITNCFLLAVMGYDRYVAICNPLRYSVIMNWRVCVILASSVCATGFLLSLVQALAIFRLPFCNTLIKHFFCDVRPILDLACTVPVINQVLTLVLTLMVLTAPAIFLFVSYALIISTILKIASSDGWKKTFATCSSHLTVVVIHYGCASIVYFKPKSENSKDQDQLLSVTYTVITPLLNPVVYSLRNKEVQDALRKVLCRKSLS

SEQ ID NO: 1670 - protein, 310 aa, Mus musculus
MKKTNCTHVREFVFQGFSNFQEHQFTLFVVFFVLYILTLAGNVIIVTIIRIDHHLHTPMYFFLSVLSTSETFYSLVIIPRMLGSLVGLSQTISLECCGTQLFFFLGFAITNCLLLAVMGYDRYVAICNPLRYSVIMNWRVCVILASSVGATGFLLSLIQAVAIFRLPFCNTLIEHFFCDVRPILDLACTVPVINDILTLALSLMVITAPATFLFVSYVLIISTILKIASAEGRRKTFATCASHLTVVVIHYGCASIAYFKPKSENTKDQDQLISVTYTVITPLLNPVVYSLRNKEVQDALRKVLGKKSLS

SEQ ID NO: 1671 - protein, 305 aa, Mus musculus
MDQNNNTVSEFIMLGFTTDPVIQKVLFAVFLVVYTLTLMGNSSLIMLICNDSRLHTPMYFFIGNLSFLDLGLSSVYTPKILETCISEDKSISFAGCVAQFFFSAALDYTECYLLAAMAYDRYVAISKPLLYSQAMSLKLCVCFVAASYVGGFINSVIITKDTFALTFCNDNVIDDFFCDIPPLVKLACGKKKSFQSVLFFLLTSNVIIPIVFILATYLFIIATILRIRSTQGRLKAFSTCSSHLISVTLYYGSILYIYARPRSSYSLDRDKIVSTFYTVVFPMLNPLIYSLRNKDVKEALNKLLK

SEQ ID NO: 1672 - protein, 317 aa, Mus musculus
MRNLSGSHVEEFVLVGFPTSRPFQALLFVFFFAIYLLTLLENVLIVSTIWLTPSLHRPMYFFLGHLSFLELWYINVTIPRLLGAFLTQDGRVSYGGCMTQLYFFIALACTECVLLAVMAYDRYLAICEPLRYPSLMPPRLATRLAAASWGSGFFSSMMKLLFISRLSYCGPNIINHFFCDISPLLNLTCSDKEQAELVDFLLALVMILLPLVAVVSSYAAIIVAILRIPTAQGRHKAFSTCTSHLAVVVIYYSSTLFTYARPRAMYTFNYNKIISVLYTVIVPFLNPAIYCLRNKEVKDAFRKTMLGRCHHPREGPD

SEQ ID NO: 1673 - protein, 312 aa, Mus musculus
MSPGNSSWIHPSSFLLLGIPGLEELQFWLGLPFGTVYLIAVLGNVIILFVIYLEHSLHQPMFYLLAILAVTDLGLSTATVPRALGIFWFGFHKIAFRDCVAQMFFIHLFTGIETFMLVAMAFDRYIAICNPLRYNTILTNRTICIIVGVGLFKNFILVFPLIFLILRLSFCGHNIIPHTYCEHMGIARLACVSIKVNVLFGLILISMILLDVVLIALSYAKILHAVFKLPSWEARLKALNTCGSHVCVILAFFTPAFFSFLTHRFGHNIPRYIHILLANLYVIIPPALNPLIYGVRTKQIRDRVVIFFCKEV

SEQ ID NO: 1674 - protein, 320 aa, Mus musculus
MAKEVEVRMKAWNETTVLEFVLEGFLVAQHLGKVLFLVHLLVYLASVTGNTLIIAITWSDPRLQTPMYFFLRSFSFCECCFISTVIPKLLAIFLFGDRTIHFTPCIIQAFSFLFLGSTIFFHMAVMSLDRYLAICKPLRYPAIMNPRVCFLLVFFSYVLSFILVTGVILRLSRLSFCGSNVIPHFFCDLGSLIHLSCSDTKSLESMAFGVAVVVLFTSVLAAIFAYSNILISIMRLPLAKDRQKAFSTCSSHLIVLSLMYGSCVFIYVKPKQVSRLESNREAALVNTVVTPLLNPVIYTLRNKQVHQALRDALSRVNLQK

SEQ ID NO: 1675 - protein, 313 aa, Mus musculus
MLHSNKTQFHPSSFLLIGIPGLEELHLWIGFPFFAVYLIAVLGNIIILFVIQTERSLHQPMFYFLAMLACTDLGLSTATIPKMLGIFWFNLREIAFGACITQMYIIHTCTGLESVVLTIMAIDRYIAICYPLRYSMILTNKVIAILGIIIIVRTLIFVTPFIFLILRLPFCGVRIIPHTYCEHMGLAKLACANIKVNVIYGLVAFSVGYIDLSVIGFSYIRILQAVFRLPSWDARLKALSTCGSHVSVMLAFYLPALFSFMTHRFGHNIPHYIHILLANLYVVVPPALNPVIYGVRTKQIRERVLRMLNPKMH

SEQ ID NO: 1676 - protein, 319 aa, Mus musculus
MLQMQDNTEFLSNFTSKLPTFLLTGIPGLESAHGWISIPFCCLYATALSGNSMILFIIVTQHSLHEPMYYFLSVLSATDLGLTFSTMSTTLRILWFQANEISLDFCIVQMFFLHGFTCTESGVLVAMAFDRYVAIYKPLRYTMILMNSRIIQIGFLVIMHTLLLTVPLLLLLKPVSFCKRNTLSHSYCYHPDVIKLACSDTRANSICGLVDLILTTGVDIPCIVLSYILIIRSVLNIAFSEERHKAFSTCVSHIAAVAVFYIPTFSLSLVHRYGRSVPKVVHTMMANVYLLLPPVLNPIIYSVKTKQIRKAILSLLFAK

SEQ ID NO: 1677 - protein, 316 aa, Mus musculus
MVNDTTHHYISFFYLVGIPGFENFYYLISIPVCLLFVLTLLGNSVVIATIKLEPSLHQPMYFFLCMLAMNDILLTCSTSLKMLGIFWFNEHWIEFDVCLTQMYFIHTLCIFESAILVAMAFDRFVAICIPLHYATILTTAMVIKLGVVGLSRALLMVLPCPLLIKRLPYYTGYIIPHTYCEHMAVVKLASANTFINRAYGISAALSVITLDVWLIAASYIKILQAVFRLSSQNARSKALGTCAAHVCTILAFYTPALFSFLTHRIGKNVPPSVHIILASMYLLVPPTVNPLVYGVKTKQIRDRVLSLFSHLKIAEY

SEQ ID NO: 1678 - protein, 315 aa, Mus musculus
MQHTNHSHQNPSSFLLMGIPGLEASHFWIAFPFCSMYALAVLGNMAVLLVVRSEPSLHQPMYLFLCMLSTIDLILCTSTVPKLLALFWANAAEIAFGACATQMFFIHGFSAVESGILLSMAFDRYLAICRPLHYGSLLSSESVSKLGAAALLRGLGLMTPLTCLLARLSYCGRVVAHSYCEHMAVVKLACGGTQPNNIYGITAATLVVGTDSICIAISYALILRAVLGLSSKEARAKTFGTCGSHLGVILLFYTPGLFSFYTQRFGQHVPRHVHILLADLYLVVPPMLNPIIYGMKTKQIRDGALRLLKRGPAQS

SEQ ID NO: 1679 - protein, 324 aa, Mus musculus
MLGPSYNHTMESPGTFFLLGIPGFQSSYLWLAISLSTMYSIALLGNMLIIIVICMDSTLQEPMYFFLCVLAAVDIVMASSVVPKMVSIFSSGDSSISFNACFTQMYFVHAATAVETGLLLAMAFDRYVAICKPLHYMRILTRHVMLGISVTITVRAVIFMTPLSWMLSHLPFCASNVVPHSYCEHMAVAKLACADPMPSSLYSLIFSSIIVGSDVAFISASYSLILKAVFGLSSRNAQWKALSTCGSHVGVMALYYLPGMASIYVAWLGQDRVPLHTQVLLADLYLIIPPTLNPIIYGIRTRQIRERIWSLLTHCFFSQCTQGS

SEQ ID NO: 1680 - protein, 308 aa, Mus musculus
MQLNINVTEFILLGLTQDPSRKNIVFAIFLFFYMGTLLGNFLIIVTIKTSPALGSPMYFFLFYLSLSDTCFSTTVAPRTIVDSLLKEASISFNECIIQVFTFHLFGSLEIFILILMAVDRYVAICKPLHYMTIMNRQVCGMLVATVCVGSCIHSSVQIILALSLPFCGPNEIDHYFCDLQPLLKLACSDTYVINLLLVSNSGTLCTVSFLMLMVSYIIILYSLRNHSAEGRRKALFTCVSHIIVVILFFVPCIFIYTRPATTFPMDKMISVFYTICTPFLNPLIYTLRNAEVKNAMRKLWSKKISDDI

SEQ ID NO: 1681 - protein, 312 aa, Mus musculus
MADVNFTFVTEFILLGLTDRDELKVFLFILFLLIYVISLVGNLGMFMLIHITPKLHTPMYHFLRSLSFVDACYSSVFAPTLLLNFFVEKETISFSACILQYFLFASLLTTEGFLLAAMAFDRYVAIVNPLTYTVVMTKLICVLLVLGSCLGGTITSLTHTIGLIKLSFCGPNVISHFFCDLPPLLKLSCSDTSMNELLLLVFSGVIAITTLLTVVLSYIFIVAAILRIRSAAGRHKAFSTCASHLTAVTLFYGSISFSYIQPSSQYSLEQEKVVSVFYTLVIPMLNPLIYSLRNKEVKDAVKRVMEIKHSLH

SEQ ID NO: 1682 - protein, 316 aa, Mus musculus
MITSNVSSYNPGPFLLVGIPGLEHFHVWIGIPFCVIYIIAVVGNCILLYLITVERSLHEPMFFFLSMLAMTDLILSTDGVPKTLSIFWMGAREITFPGCLTQMFFLHYSFVLDSAILMAMAFDRYVAICSPLRYATILTPKTIVKIAVGISFRSFCIILPVVFLLTRLPFCRTRIIPHTYCEHIGVARLACADISINIWYGFCVPIMTVISDVVLIAVSYTLILCAVFRLPSRDARQKALGTCGSHVCVILMFYTPAFFSILAHRFGHNVSLTFHIMFANLYIVIPPAMNPIVYGVKTKQIREKVILLFSVKSIDG

SEQ ID NO: 1683 - protein, 320 aa, Mus musculus
MGTKHATNSSEFQVSEFILLGFPGIHEFQIWLSLPMALLYIIALGANFLILITIYLEPNLHQSMYQFLGILAVVDIGLATTSMPKILAILWFDAKTISLPECFAQIYAIHTFMSMESGVFLCMAIDRYVAICYPLQYPSIVTEAFVIKATLSMMLRSGLLTIPVPVLAAQRQYCSRNEIDHCLCSNLGVISLACDDITVNRNCQLTLAWLILGIDMILVCVSYALIIRSVLRLNSTEAVSKALSTCSSHLILIMFYYTAIVILSVTHLAGRRVPLIPVLLNVMHIVIPPSLNPMVYALRTQELKVGFRKVFDLSHYVSRK

SEQ ID NO: 1684 - protein, 310 aa, Mus musculus
MTAKNSSVTEFILAGLTNQPGLRMPLFFLFLGFYMVTVVGNLGLISLIGLNSHLHTPMYFFLFNLSVIDFCYSSTIIPKMLTSFISKTNIISHSGCMTQLFFFCFFVFSESFILSAMAYDRYVAICNPLMYTVTMSPQVCLLLLLGVYVMGFSGGIAHTGNLMNLTFCADNLINHFMCDILPLLELSCSNTFTNELVVFIVVAFGIGVPIVTIFISYALILSSILYMHSTEGRSKAFSTCSSHLIVVCLFFGSGAFMYLKPPSILPLDQGKVSSLFYTIVVPMLNPLIYSLRNKDVKVALRKTLGKRILS

SEQ ID NO: 1685 - protein, 319 aa, Mus musculus
MFQILRDSNSSRFQVSEFILMGFPGIHSWQHWLSLPLALLYVLALIANILIVTVIYQEASLHQPMYHFLGILAIVDVGLATTIMPKILAILWFNDNNISLPECFAQMYAIHCFVAMESGIFVCMAIDRYVAICKPLRYSSIVTESFVVKATVIMAIRNFVAPMSVPVLAAQRNYCFQNKIEHCLCSNLGVTSLACDDRKINSINQLFLAWTLMGSDLALIMISYALILRSVLRLNSAEAASKALSTCTSHLILIFFFYTVIVVISITHSVGIKIPLIPVLLNVLHNVIPPALNPMVYALKNKELKQGLYKVLRLDVKEG

SEQ ID NO: 1686 - protein, 306 aa, Mus musculus
MEKGNQSTVNKFFLSGLTEQPELQLPLFLLFLGIYLLTVLGNLGMIILILLSSYLHTPMYFFLSSLSFIDFCQSTVITPKMLVKFVREKNEISYPECITQLCFFVIFAVSESYMLAAMAYDRYVAICSPLLYSSIMSQHKCLSLVLGVYILGIVCASAHVGCIFRIDFCKSDLINHYFCDLISILNLSCSNIFVNDLVILIFSLINTIFPTLTILSSYAFIIISILRIKSTEGRSKAFSTCSSHISAVAIFYISAGFTYLNPSSSHSMDEGKVSSIFYTIIVPMLNPLIYSLRNKDVKIALKKMIE

SEQ ID NO: 1687 - protein, 308 aa, Mus musculus
MEQGNHSTVKKFFLSGLTEQPELQLPLFLLFLGIYLLTVLGNLGMIILILLSSHLHTPMYFFLSSLSFIDLCQSTVITPKMLVNFVREKNEISYPECITQLYFFLLFAISECYMLAAMAYDRYVAICSPLLYSSIMSQHKCLSIVLGVYIIGIVCASAHVGCMFRIDFCRYDVINHYFCDLISILKLSCSDAFVNELMILIFSGVNIIAPTLTILSSYVFIIMSILRIKSTEGRSKTFSTCSSHISAVAVFYGSAAFMYLNPSSSNSMDEGKVSSIFYTIIVPMLNPLIYSLRNKDVNIALKKMIQRR

SEQ ID NO: 1688 - protein, 311 aa, Mus musculus
MAEGNFSVVTEFILTGLTEKPALQLPLLFLFLGIYVVTVIGNLGMVMLILFSSHLHTPMYFFLSNLSFVDLCQSSVIMPKMLEKFVMVKSVISYAECMAQFYLFDVFAVSECHMLAVMAYDRYVAICNPLLYNVTMSYKVCSWMVVGVYSVGLICATGETVCLLRLLFCKAGDINHYFCDLLPLLEQSCSNTFINEILGLSFSSFNITVPALTILSSYIFIIASILRIPSTEGRSKAFSTCSSHILAVAVFFGSLAFMYLQPSSVSSMDQGKVSSVFYTIVVPMLNPLIYSLRNKDVKVAFYKVVGRREFM

SEQ ID NO: 1689 - protein, 308 aa, Mus musculus
MEKSNDSSEYGFILEGFSDRPRLEMVLFIVNFTLYSVAVLGNITIILVCILDPRLHTPMYFFLANLSFLDLCFSTSCIPQMLVNLWGPDKTISYAGCVVQLFSFLSIGSVECILLAVMAYDRYAAVCKPLHYMVIMHPQLCVRLMAVAWGVGLANAIIMSPLAMTLSRCGRRRINHFLCEMPALIKMACVDARPVEMLSFTLAILIVLLPLTLILVSYGYIAAAVLRIKSAAGRWKAFNTCSSHLTVVSLFYGSIIYMYMQPGNSSSQDQGKFLTLFYNLVTPMLNPLIYTLRNKEMKGALKKVCGRH

SEQ ID NO: 1690 - protein, 316 aa, Mus musculus
MGILKDGNHTAVTEFILLGLTDDPVLKVVLFTIILCIYLVTVSGNLSTILLIRVSSQLHHPMYFFLSHLASVDIGISSSVTPNMLVNFLLERSTISYLGCGIQLGSGAFFGSTESFLLAAMAYDHFMAICNPLLYSTKMSTQVCIQLLVGSYIGGFLNASSFILSFFSFLFCGPNKVNHFFCDFTPLVELSCSDNSVLLILDSFSAGSIIVITVLVIAISYTYILITILKMHSTEGRHKAFSTCTSHLTAVTVFYGTVTFIYVMPKSSYSTDQNKVLSVFYMIAIAIPMLNPLIYSLRNNEIKNALKRQLSKKTFS

SEQ ID NO: 1691 - protein, 314 aa, Mus musculus
MLMGGANLSVVSEFVFLGLTNSWDIQLLLFVFSSVFYVASMMGNSLIIFTVASDPHLHTPMYFLLANLSFIDLGVSSVTSPKMIYDLFRKHKVISFTGCVIQIFSIHVIGGVEMVLLIAMAFDRYVAICKPLHYLTILSPRMCLFFVVIAWIVGLIHSLAQLVFVINLPFCGPNVLDSFYCDLPRFIKLACVDTHKLEFMVTANSGFISVGSFFILIVSYIVIIISVQKHSSGGFSKALSTLSAHISVVVLFFGPLIFVYTWPTPSVHLDKFLAIFDAVITPFLNPVIYTFRNQEMKMAMKRVFKQLLSYRKIS

SEQ ID NO: 1692 - protein, 314 aa, Mus musculus
MAGRNYTFVTEFFLTAFTEHPEWGLPLFLLFLSFYLATLLGNTGMIILIQKNRRLQTPMYFFLSHLSFVDICYSSVIIPQMLAVLWEHGSTISQVRCAVQFFLFTFFASIDCYLLAIMAYDRYVAVCQPLLYVTIMTEKARVGLVTGAYVAGFSSGFIRTVTAFTLSFCGNNEINFIFCDLPPLLKLVCGDSYIQEVVIIVFAIFVMPACIVVISVSYLFIIVAIMQIRSAGGRAKTFSTCTSHLTAVALFFGTLIFMYLRDNTDQFSERDRVVSVFYTVVTPLLNPLIYSLRNKEVKEAITKSLRRSKISRAP

SEQ ID NO: 1693 - protein, 329 aa, Mus musculus
MISFNIRRIFVVSMTWENHSVLMEFVFLAYPNRLELRMFCFLGISLAYALIISGNILIMVSIQTETRLHSPMYYFLGSLSGIELCYTAVVVPHILANTLKSEKNITLLSCATQMVFFIGLGSADCFLLASMAYDRYVAICHPLQYPLIMTVTLCVRLVLASVVIGLVLSLQLVVFIFCLPFCQDRGIEHFFCDVPPVMRLVCATSHIHELSVLVAAALAIAVPFFFIATTYALIVAAVLKLHSAAGRHRAFNTCSSHLTVVLLQYGCCAFMYLRPNSSYHPKKDQFISLVYTLGTPFLNPLIYTLRNNEMKGAIEKVLTRNYFSQKNIQ

SEQ ID NO: 1694 - protein, 314 aa, Mus musculus
MAFLEDGNHTAVTGFILLGLTDDPVLRVVLFVIILCIYLVTVSGNLSTILLIRVSSQLHHPMYFFLSHLASADIGYSSSVTPNMLVNFLVERNTISYLGCGIQLGSAVFFGTVECFLLAAMAYDRFIAICSPLLYSNKMSTQVCVQLLVGSYIGGFLNASSFTLSFFSLVFCGPNRVNHFFCDFAPLVKLSCSDVSVPAVVPSFTAGSIIIVTIFVIAVSYIYILITILKMRSTEGRQKAFSTCTSHLTAVTLFYGTITFIYVMPKSSYSTDQNKVVSVFYMVVVPMLNPLIYSLRNKEIKGALKRQLAKNTFS

SEQ ID NO: 1695 - protein, 314 aa, Mus musculus
MAFLEVGNHTAVTEFILLGLTDDPVLRVVLFTIILCIYLVTVMGNLSTILLIRVSSQLHHPMYFFLSHLASVDMGLSSSVTPNMLLNFLIERNTISYLGCGIQQSLADFFGSVECFLLAAMAYDRFMAICNPLLYSTKMSTKVCVQLVVGSYIGGFLNASLIMFYFFSFLFCGPNRVDHFFCDFAPLVELSCSDVSVSVIVISFSAGSVTMITVFVIAVSYSYILITILKMHSIEGRHKAFSTCTSHLTAVTLYYGTITFIYVMPKSSFSTDQNKVVSVFYMVMIPMLNPLIYSLRNNEIKGAIKRQLGKKMSC

SEQ ID NO: 1696 - protein, 314 aa, Mus musculus
MAFLQDGNHTAVTEFILLGLTDGPILRVILFTIILCIYLVTVSGNLSTILLIRVSSQLHHPMYFFLSHLASVDMGLSSSVTPNMLVNFLVKQNTISYIACSIQFGLAAFFGTVECFLLAAMAYDRFVAICNPLLYSTKISTESCIQLVVGSYIGGFLNASSFILSFFSFIFCGPNRINHFYCDLAPLVELSCSDVSVSVVVTSFSAGSVTVITVFVIAVSYSYILITILKMHSTEGRHKAFSTCTSHLTAVTLYYGTITFIYVMPKSSYSTDQNKVVSVFYMVVIPMLNPLIYSLRNNEIKGAIKRQLGKKMFC

SEQ ID NO: 1697 - protein, 310 aa, Mus musculus
MEPGNHTAVTKFILLGLTDDPTLCVIFFVFFLGIYIVTLVGNISIINLVRSCPQLQTPMYMFLSHLAFVDIGYSTSVTPIMLIGFIVHETGLPVHACEAQLCSVVTFGTAECFLLAAMAYDRYVAICSPLLYSTHMSSQICLLLVGASYVGGCVNAWTFTGCLLSLSFCGPNKIDHFFCDFSPLLKLSCSDVSIIGIIPSISAGSIIVVTVFVISVSYIYILITILKMRSTEGRHKAFSTCTSHLTAVTLYYGTITFIYVMPKSSYSTKQNRVVSLFYTVVIPMLNPLIYSLRNRDVKEALRKATLRIYS

SEQ ID NO: 1698 - protein, 315 aa, Mus musculus
MAFLQDGNHTAVTEFILLGLTDDPVLRVVLFTIILCIYLVTVFGNLSTILLIRVSSQLHHPMYFFLSHLASVDIGISSSVTPSMLVNFLLERSTISYLGCGIQLGSADFIASVECFLLAAMAYDRFMAVCNPLLYSTKMSTQVCVQLVVGSYIGGFLNASLIVTVYFFSFLFCGPNRIDHFFCDFAPLAELSCSDVSVSVLIISFSAGSVTMITVFVIVISYSYILITILKMHSTEGRHKAFSTCTSHLTAVTLYYGTITFIYVMPKSSFSTDQNKVVSVFYMVMIPMLNPLIYSLSNNEIKGALKRQLGMKTLS

SEQ ID NO: 1699 - protein, 314 aa, Mus musculus
MAFQEDGNHTAVTEFVLFGLTDDPVLRVILFIIFLCIYLVTVSGNLSTILLIRVSSQLHHPMYFFLSHLAFADIGYSSSVTPNMLVNFLVERHTISYIGCAIQLGSVVFFGSSECFILAAMAYDRFMAICNPLLYSTKMSTQVCVQLLLIAYIGGFLNTWSFTICFYSLVFCGPNGVNHFFCDFAPLIELSCSDVSVPATVPSFTAGSIIVVTVIVIAISYIYILITILKMHSTEGRQKAFSTCTSHLTAVTLFYGTITFIYVMPKSSFSTDQNKVVSVFYMVVIPMLNPLIYSLRNNEIKGALKRQIGRKIFS

SEQ ID NO: 1700 - protein, 323 aa, Mus musculus
MAFLEDGNHTAVTEFILVGLTDDPVLKVILFTIILCIYLVTVSGNLSTILLIRVSSQLHHPMYFFLSHLASVDLGYSSSVTPNMLINFLAENNTISYIGCSIQFGSATFFGVLECFLLAVMAYDRFVAICNPLLYSIKMSTQVCVKLVVGSYIGSSLNASFVTVSIFNLLFCGPNKINHFFCDFDPLIELSCSDVSVPVAVTSCSAGLITMITVFVIAVSYTYILITVLKMRSTEGRHKAFSTCTSHLTAVTLFYGTVTFIYVMPKSNYSTDQNKVVSVFYMVVIPMLNPLIYSLRNNEIKGALKRQLGKKIFSQSNILFCKS

SEQ ID NO: 1701 - protein, 314 aa, Mus musculus
MAFLDNGNHTAVTEFILLGLTDDPFLRIVLFSIILCIYLVTVFGNLSTILLIRVSSQLHHPMYFFLSHLATVDLGISSSVTPSMLVNFLAERSTISYLGCGIQLSSAALFGTLECFLLAVMAYDRFMAICNPLLYSTKLSTRFCIQLVVGSYIGAFLNDSCYILSFAFFLFCGPNKVDHFFCDLSPMMELSCSDASVSGVVISFTAGSITMTTLIVIVISYFYILITILKMRSTEGRQKAFSTCTSHLTAVTLYYGTIIFIYVMPKSTYSRDQNKVVSLFYMVVIPMLNPLIYSLRNNEIKGALKKQFYRKTLL

SEQ ID NO: 1702 - protein, 315 aa, Mus musculus
MGYTNLSYLNPGTVILIGIPGLEHVQFWIGFPFFVVCLVALLGNLFLLIIIPTERSLHQPMYIFLAVLAATDLGLCLAIAPKMLAIFWFGSCSMAFDACLTQLFFIHALQGMESGVLLAMAFDRYVAICDPLRHTAVLTPLFLLRVVLVVAIRATVLVGVLPILLKRLQWFHSVVIVHSYCEHMAVVKLAAEDVRINKSYGLFVAFAILGFDMIFVFISYILIFRAVFRLPQKEARSKAFNTCTAHIVVFLEFYILAFFSFFSHRFGHVSPYVHILLSTIYLLLPPALNPIVYGVKTKEIRKWVVQIFVLKSNTQ

SEQ ID NO: 1703 - protein, 308 aa, Mus musculus
MKNITEATFFVLKGLTDNNELQIILFFLFLAIYLFTLIGNVGLIILVVGDPQLHNPMYCFLSALSFVDACYSSDITPNMLVGFMSKSKIISFYGCATQMFLAVTFGTTECFLLAAMAYDRYVAIHDPLLYAVSMSPRVYLPLIIASYAGGIVHAIIHTVATFSLSFCQSNEVKHIFCDIPPLLAISCSETYVNELLLFFFVSFIELVTILIILFSYAFILLSILKMNSAEGRRKVFSTCGSHLTAVSICYGTSLFMYVRPSSNYSLEHDMIVSTFYTIGIPMLNPIIYSLRNKDVKEAIKRVLRKNFI

SEQ ID NO: 1704 - protein, 319 aa, Mus musculus
MKNQSVEIIFILLGLTDDPQLQIPIFLFLFFNYILSLMGNLVIILLTLLDPRLKTPMYFFLRNFSFLEIAFTTACIPRFLMSILTGDRTISYNACAAQLFFFFLSLITEFYLLAAMSYDRFVAICRPLHYPIIMNSKVCHLLVLSSWVTGFFVIFPPLLLGLKLDFCASKTIDHFLCDTSPVLQLSCTDTRFIELMAFALAVMTLIITLILVILSYTLIIKTILKFPSAQQRKKAFSTCSSHMVVVSITYGSCIFMYMKTSAKERVSLNKGVAVLNTSVAPLLNPFIYTLRNQQVKDAFKQVLHRMCYSQNSELRFRPK

SEQ ID NO: 1705 - protein, 311 aa, Mus musculus
MRNRTVTTFILLGLTDDIRLQILLFIFLLSSYMLSLSGNLTIITLTLIDPHLKTPMYIFLKNFSFLEISLTTACIPRFLYSISSGDKSITYIACASQLLFIDLFAVTEFFLLAIMSYDRYVAICKPLHYMTIMNSRVCKNFIFSCWVAALIIILPPIGLGLGLEFCDSDIIDHFCCDAAPLLKISCSDTWLIEQMVIAGAVLTFIITFVCVVLSYVYIIKTILRFPSAKQRKKAFSTCSSHMIVVSITYGSCIFIYVKPSSKDDVAINKGISLLIISISPMMNPFIYALRNKQVKQAFNYSIKKIAFLSKM

SEQ ID NO: 1706 - protein, 299 aa, Mus musculus
MKNHSVITEFLLLGISDTPELQFVIFIFLFIAYILSVTGNLTIIILTLLDSQLKTPMYFFLRNFSFLEIIFTSVSIPRFLESIITKVKTISYNNCLAQLFFFISMGVSEFFLLTAMSYDRYVAICKPLHYTLIMNQKVCTLLVLTSWLGGFLTIFPLLMLFLKLDFCASNVIDHFCCDYFPILQLSCSDTWFLETIGFYFAFITLLFTLALVILSYICIINTILRFPSASQRKKAFSTCSSHMIVISISYGSCIFMYVKPSANERASLTKGVALLNTSIAPHAEPFYLHLEKSTSKTSF

SEQ ID NO: 1707 - protein, 323 aa, Mus musculus
MLHVNITNPIFSTFLVTGIPGLEAVYIWIAIPFCAMFLITMVGNMTIIIVIWHEQTLHVPMYLFLAMLASSDLGLSLFTFPTLLRIFLLNDRELTTTACFTQMFFIHTFQLLESAIILAMAFDWYVAISHPLHYHSILTDTVIGKIGLTIVGRTLTLQVPAPILLRRLYFCSSNVLSHSYCLHPDIIKLSCSSTTVNSIFGLFVVLSTLGLDFLLILLSYALILKTVLNMASHSGRLKALNTCISHLCAVVLFFTPMICLSMLHRFGPRLPSHVYVTLANMHFLIPPVMNPIVYVVKTKQIRDKIQKLFIRKATKKAQAASIT

SEQ ID NO: 1708 - protein, 310 aa, Mus musculus
MGQNDSSVVEFILLGFSHFPELQVHMFGAFLVIYLVTLTGNATIVTVIFLDHSLHIPMYLFLQNLSVVEASFSTTVMPEMLVVLTSEKATISFGGCFAQTYFILLFGGTECFLLGAMAYDRFAAICYPLTYPMIMSKRIFVKLVVCSWVLGIMTATVSVTWVFSFPFCGPSKINHISCEVPAVLELACADTFLFEVYSFTGTILLVLVPFLLILLSYTQILFTVLRMPSTTGRQKAFSTCASHLTSVTLFYSTACMTYLQPKSKYSPDTKKLMSLAYSLLTPLLNPLIYSLRNKEMKRAVVKLCQIKVVF

SEQ ID NO: 1709 - protein, 314 aa, Mus musculus
MRRQNHNSTVEFILLGFSNYPELQGQMFGAFLVIYLVTVLGNAIIITIIFLDQSLHIPMYLFLQNLSLVDLCFSTVITPEILVVLTSEKATISFGGCFVQMYFILLFGGTECFLLGAMAYDRFAAICHPLSYPVIMNKSVFVKLVMFSWVSGTMMTTLQTTWVFSFPYCDHKEINHLFCETPPVLELACADTFLFEVYAFTGTILIVMVPFLLILLSYTRILFSILRMPSTTGRQKAFSTCASHLTSVTLFYGTASITYLQPKSRYSPDTKKLMSLAYTLLTPLLNPLIYSLRNKEMKRAVVKLWQRKVTLHTG

SEQ ID NO: 1710 - protein, 326 aa, Mus musculus
MSLRQTQGSNIVMRRQNHSSTVEFILLRFSNYPELQDQMFGTFLVIYLVTVMGNAIIITIIFLDQSLHIPMYLFLQNLSLVDLCFSTVITPKMLVVLTSKKATISFGGCFAQMYFILFFGVTECFLLGAMAYDRFAAICHPLSYPMIMNKRVFMKLVMFSWVSGTMMSTLQTTWVFSFPYCDHKEINHLFCETPPVLELACADTFLFEVYAFTGTIFIVMVPFLLILLSYTRILFTILRMPSTTGRQKAFSTCASHLTSVTLFYGTASIIYLQPKSRYSPDTKKLMSLAYILLTPLLNPLIYSLRNKEMKRAVLKLWQRKVAFHTA

SEQ ID NO: 1711 - protein, 309 aa, Mus musculus
MGRGNRTTVTEFVLMGFTDRPELQLPLFVVFLILITLVGNLGMILLIKADSRLHTPMYYFLSHLAFIDLCYSSSIGPKMLQNLLVKKKTISFSGCFAQLYFSSAFVTTECFLLATMAYDRYMAICNPLTYTAIMTQRVCKELVIGVYTYGFLNSVIQTVLTFQLSFCNSNVIHHFYCADPPLLALSCSDTHNKERQLLIFSAVNLTGSLMTVLISYICILVSIIKIEPSQGKCKAFSTCASHLTVVTIFYGTLFFMYMRQPKTGSSWKYSKVISVFYSLVIPMLNPLIYSLRNTEVKDTLKKMLEGKTS

SEQ ID NO: 1712 - protein, 312 aa, Mus musculus
MGTGNWSQVIEFIILGFPHFQGVQIYLFFLLLSIYLTTILGNLLIFLVVYLDSRLHTPMYRFVSILSFLELGYTAATIPKMLANLLSEKKTISFSGCLLQIYFFHSLGATECYLLTAMAYDRYLAICRPLHYPTLMTQSLCIKIAIGCWLGGLAGPVVEISLVSRLPFCGPNHIQHIFCDFPPVLSLACTDTSVNVLVDFIINSCKILATFLLILSSYLQIIRTVLKIPSAAGKKKAFSTCASHLTVVLIFYGSILFMYVRLKKSYSLDYDRALAVVYSVITPFLNPFIYSLRNKEIKEALKRQLMRTGILR

SEQ ID NO: 1713 - protein, 315 aa, Mus musculus
MRINRSTSVTEFLFSGFPQFEDGSFLFFIPLFFIYIFIVIGNLIVFFAVRMDTRLHNPMYNFISIFSFLEIWYTTATIPKMLTNLISKQRTISLIGCLLQMYFFHSLGNSEGILLTTMAIDRYVAICNPLRYPTIMTPRLCAQLSAGSCIFGFLVLLPEIAWISTLPFCGPNQIHQIFCDFEPVLRLACTDTSMILVEDVVHAVAIIFSVLVIAISYMRIITVILRIPSGEGRRKAFSTCAAHLGVFLMFYGSVSLMYLRFSATFPPILDTAIALMFAVLAPFFNPIIYSLRNKDMKIAIKKLLCSQKMLPTSAS

SEQ ID NO: 1714 - protein, 315 aa, Mus musculus
MENGNLSTVTVFVFTGFPQLKNGGLLYFFPLLFIYIFIVTGNLMIFFAVRLDTRLHNPMYNFISIFSFLEMWYTTATIPKMLSNLISEQKTISFIGCLLQMYFFHSLGNTEGTLLTVMAIDRYVAICNPLRYPNIMTPRLCAQLTAGSCVFGFLILLPEIVWISTLPFCGPNQITQIFCDFTPLLKLACTDASVILVQDVIHALAILITSLIISLSYIRIIVVILSISSTEGRKKAFSTCAAHIAVFLLFFGSVALMYLRFSATYTPFWDNTIALTFSVFAPLFNPIIYSLRNKDMKDAINKLICSQKVSNESRR

SEQ ID NO: 1715 - protein, 318 aa, Mus musculus
MTQLVASQNQTMVIEFLFSVFPPLYEGGLLFFILLILVYAFIISGNLVIFVAVQLDMALHTPMYFFISVLSFLEIWYTTTTIPKMLSSLVSEKKTISLGGCLMQMYFFHSLGITEGCILTAMSIDRYIAICYPLRYPTIMTSKLCIQLTAGSCFCGFLLVLPEIAWIATLPFCGSNKIHQIFCDFTPVLSLACTDTSLVVIVDAIHAVEILASFLVIALSYIRIIMVILGMPSAEGRHKAFSTCAAHLAVFLLFFGSVAVMYLRFSATYSVFWDTVIAVTFVILAPFLNPIIYSLRNKEMKDAIGRLFHQKRDVRAQK

SEQ ID NO: 1716 - protein, 299 aa, Mus musculus
MWNTSEAAFLSCSCWYTCSPLVVICSSSLVIRLDAALHKPMYHFVSVLSFLELWYTATTMPKMLANLLSEKKTISFAGCLLQTYFFHSLGASECYLLTAMAYDRYLAICRPLHYPSIMTTALCVKMAAGCWTCGFLCPISEVILVSQLPFCNYNEIPHIFCDFPPLLSLACKDTSTNVLVDFAVNAFIILITFLFIMASYGRIIGAVLKIKTAAGRRKAFSTCASHLIVVLIFFGSIIFMYVRLKKSYSLTLDRTLAVVYSVLTPLANPIIYSLRNKELIQAIKRTFFKKVEKASPTHH

SEQ ID NO: 1717 - protein, 314 aa, Mus musculus
MDHVNYTWTRTFILAGFTTSGALRPLAFLGTLCIYLLTLAGNLFIIVLVQADSGLSTPMYFFISVLSFLELWYVSTTVPTLLHTLLHGHSPIPSSACFVQLYVFHSLGMTECYLLGVMALDRYLAICRPLHYHALMSKQVQLWLAGATWVAGFSAALVPACLTASLPYCLKEIAHYFCDLAPLMRLACVSTRWHARVHGAVIGVATGCNFVLILGLYGGILTAVLKLPSAASRAKAFSTCSSHMTVVALFYASAFTVYVGSPQSRPEGTDKRIALVYALLTPFLNPIIYSLRNKEVKEAVKRVSEKIRTLLRDT

SEQ ID NO: 1718 - protein, 312 aa, Mus musculus
MDHVNYTWTRTFILAGFTTSGTLQHLAVFGTLCIYLLTLAGNLFIIVLVQADSGLSTPMYFFISVLSFLELWYVSTTVPTLLHTLLHGPSPIPSSACFVQLYVFHSLGMTECYLLGVMALDRYLAICRPLHYHALMSRQVQKQLVGVTWLAGFSAALVPAGLTASLPYCLKEVAHYFCDLAPVMQLACVDTSWHARLYIAVIGMINTCNLTFILGLYGGIVRAVLKLPSAASRAKAFSTCSSHITVVTLFFGSAFIVYVGPPEIRAEGRDKLIALVYTLLTPFFNPIIYTLRNKEVKEAFKRVTQRINAVLK

SEQ ID NO: 1719 - protein, 313 aa, Mus musculus
MVESNVTCWQGFVFLGFSSFGELQLLLFVLFLSLYLVTITSNVFIIIVIRLDSHLHTPMYLFLSFLSFSETCYTLGIIPRMLSGLVMGGQAISFMGCATQMFFSASWACTNCFLLSVMGFDRYVAICAPLHYASRMNPTVCAQLVGTSFLSGYLFGLGMTLVIFRLSFCSSHEIQHFFCDTPPVLSLTCGDTRLSELGILILSLLVLLVSFFLISVSYAYILVAILRIPSAEGRRKAFSTCASHLTVVVIHYGCASFMYLRPKASYSLERDQLIAVTYTVATPLLNPIVYSLRNRAVQTALRNAFRGSLLGKR

SEQ ID NO: 1720 - protein, 309 aa, Mus musculus
MINQTILQEFILIGFSAYPLVQTCLFVVFLCLYMVTLASNLTIMGLTWADRYLHTPMYYFLSALSFSETCYTLTIIPKMLVDLLDKDNRISDIGCGLQMCFFLGLGGTNCILLTVMGYDRFLAICNALKYPLLMTNVACGQHVATAWVGGFLISLIETTLIFRVSFCIPNLIRHFFCHMRAVLRLSCTDSNFTEFIVTLMSVSGLLGTFLLILLTYVFILSSVLKIPSAEGKQKAFPPCASHLTVAIIHFVFAPVVYLKPENSGGDDTLIAVPYTIITPFLSPIIFTLRNKDIKNAFREIMRKTVVLKK

SEQ ID NO: 1721 - protein, 315 aa, Mus musculus
MQTLRKDNCSSVSEFLLLGFSSESQVRVALFIFFLLLYMITLLGNGLIITLIYLDSRLHTPMYFFLSILSLVDMSYVTTTVPQMLVNMVCPRRTISWGACVAQMFIFLLLGIAECVLYAIMAYDRYVAICFPLHYSVLMSRLVCIKMVTVCWSISITGALIYTVFTMRLPYCGPYKINHFFCEVPAVLKLACADTSFNDRLDFILGFIFLLVPLSLILASYACIFASILRIRSSQGRLKSFSTCASHITVVTMFYGPAMIMYMRPGSWYDPERDKKLALFYNVVSAFLNPIIYSLRNKDVKGAFLKVLGDRGAAK

SEQ ID NO: 1722 - protein, 304 aa, Mus musculus
MQELSQITVTEFILLGFTPDPRTNPLLFPFFLVFYLLILLSNSHLLAIIHQDSDLHTPPTYFFIGVLSMVGVCYATTTVSQTLAHILSRKRAISFTRCVAHIYIFLLFGVTESWLLSIMSVDRYIAICHPLRYKVIVSQGMCLLMVGICATYGVVGGLCCTFFAMRLPYCGPSEIDHYFCEVPAVLKLACADTSLSDFVDFIIGFNVIVVPLSLIAIVYANIFTVIMKIRSTQRRTKDQGEDLRLPHHCGHHVCHLMQHHAHESCLWLLIKQRQENGLFYNIATAFLNPVIYSLRNKDVKKRFL

SEQ ID NO: 1723 - protein, 313 aa, Mus musculus
MREENESSTIDFTLLGVTRQREQEYFFFILFLFIYPITVFGNMLIILAIHSDTRLHNPMYFFLANLSLVDIFFSSVTIPKMLANHLLGSKAISFGGCMAQMYFMIGLGNTDSYILAAMAYDRAVAISRPLHYATIMSPQLCVLLVAGSWVIANANALPHTLLTARLSFCGNKDVANFYCDITPLLQLSCSDIRFNVKMMYLGVGVFSVPLLCIIISYVRVFSTVLRVPSTKGFLKALSTCGSHLTVVSLYYGTVMGMYFRPLTSYSLKHALITVMYTAVTPMLNPFIYSLRNRDMKAALKKLFHCPSSSSSLM

SEQ ID NO: 1724 - protein, 314 aa, Mus musculus
MAVTNLTYKPQFQLLGLMDGTDPHPLLFLLFLSIYLLNALGNLSMVVLVRSDGALCSPMYYFLGHLSLVDVCFTTVTVPRLLATLLHPGQAISFQACFAQMYFFVALGITESYLLAAMSYDRAVAVCRPLHYGAVMTPWRCFLLVAASWAVAHLHSLLHTLLISALTYPPSAPVRHFFCDMTVMLSLATSDTSAAETAIFSEGLTVVLTPLLLVSLSYARILVAVLGIRTTGGRHRVFSTCGAHLVVVSLFFGSVLSVYFRPSSAYSARYDRMASVVYAVVTPTLNPFIYSLRNKEVKSALKRGFRWRAAPQDE

SEQ ID NO: 1725 - protein, 311 aa, Mus musculus
MESKFESNGTAVTEFILLGLVETAGLQPVIFVVFLFAYLLTVGGNLSILAAVFVEPKLHTPMYFFLGNLSMLDVGCISVTVPSMLGRLLSHKRTVPYGACLTQLFFFHQLAGVDCFLLTAMAYDRFLAICRPLTYSTRMNHTVQRILVATSWACAFSNALTHTVAISTLNFCGPNVINHFYCDLPQLFQLSCSSTQLNELLLFGLGVLMAGAPVILIVTSYIHVAAAVLRIQSSEGRKKAFSTCSSHLTVVGIFYGTGVFSYMRLGSVEASDKDKGIGILNTVISPMLNPLIYSLRNPDVQGALRRVLTGK

SEQ ID NO: 1726 - protein, 315 aa, Mus musculus
MQTKPRINGTTITEFILLGLVETPELWPLVFILFLLAYMTTVGGNLSILAAVLVEPKLHTPMYFFLGNLSVMDVGCISVTIPSMLVRLLVQKHTIPYGDCLTQLFFFHLLAGVDCFLLTAMAYDRFLAICQPLTYSTRMNYTIQRILVAMSWACAFSNALTHTVAISTLHFCGPNVINHFYCDLPQLFQLSCSSTQLNELLLFGVGFIMAGTPMALIFISYIHVAAAVLRIRSAEGRKKAFSTCSSHLTVVAMFYGTGMFNYMRLGSTKFSDKDKAIGIFNTVINPMLNPLIYSLRNPDVQAALWRVLTGRRPAA

SEQ ID NO: 1727 - protein, 315 aa, Mus musculus
MQPKPRANGTTITEFILLGLVETPELWPLVFILFLLAYMTTVGGNLSILAAVLVEPKLHTPMYFFLGNLSVMDVGCISVTIPSMLVRLLVHKRTIPYGDCLTQLFFFHLLVGVDCFLLTAMAYDRFLAICRPLTYSTRMNHTIQRILVATSWACAFSNALTHTVAISTLHFCGPNVINHFYCDLPQLFQLSCSSTQLNELLLFGVGFIMAGTPMALIFTSYMHVAAAVLRIRSAEGRKKAFSTCSSHLTVVAIFYGAGIFNYMRLGSTKLSDKDKAIGIFNTVINPMLNPLIYSLRNPDVQAALWRVLTGRRPAA

SEQ ID NO: 1728 - protein, 315 aa, Mus musculus
MQPKPRANGTTVTEFILLGLVETPELWPLVFILFLLAYMTTVGGNLSILAAVLVEPKLHTHMYFFLGNLSVMDVGCISVTIPSMLGRLLAHRLTVPYGACLTQLFFFHLLAGVDCFLLTAMAYDRFLAICQPLTYSTRMNHSVQRILVASSWACSFSNALTHTVATSTLRFCGPNVIDNFYCDLPQLFQLSCSSTQINELLLFALSFIMAGTPMALIFTSYINVAAAVLRIRSAEGRKKAFSTCSSHLTVVAMFYGTGMFNYMRLGSTKLSDKDKAIGIFNTVINPMLNPLIYSLRNPDVQAALWRVLTGRRPAA

SEQ ID NO: 1729 - protein, 310 aa, Mus musculus
MENCTKVREFILLGLTDDPGLQVSLCIMFTLIYLIDVVGNTGLIMLVLMDSHLHTPMYFFLCNLSFVDLGYSSAVTPMVISEFFIVSKVVSYNACAAQMFFFVGFATGENYLLASMAYDRYVAVCKPLHYSTRMTTSVCICLNIVSYICGFLNAIFHVGDIFSLSFCKSNVVHHFFCDVPAVLALSCSDIHLSEVILVFLSTFNVFFALLIISVSYLFIFITVLKMKSDQGHQKALSTCASHLTVVSIFYSTVIFMYLQPSSSHSMDADKVASMFYTMIIPTLNPLVYSLRNKEVNNAFKKVVERAKIFM

SEQ ID NO: 1730 - protein, 308 aa, Mus musculus
MTIMKNRTEVTEFILLGLTNDPGMQLPLFITFLLIYTITVVGNLGMILLIVLDSRLHTPMYIFLGNLSLVDFCYSSAVTPTVMTELLIGKKVISYNDCAAQMFFFGAFATVENYLLASMAYDRYAAVCKPLHYATIMTKSVYTRIITASYGISFMSASIHIADIFTLSFCKSNVIHHFFCDVPAIMALTCFDNQVRELVLLYIESLDVFFALIVICTSYMLIFVTILKMHSASGHHKAISTCASHFTAVSIFYGTVIFMYLQPSSNHSMDIDKVTSVFYTMVIPMLNPLVYSMRNKEVKNAFIKLILH

SEQ ID NO: 1731 - protein, 309 aa, Mus musculus
MTIMKNRTEVTEFILLGLTNDPGLQLPLFITFLLIYTITVVGNLGMILLIVLDSRLHTPMYIFLGNLSLVDFCYSTAVTPTVMNGLLIGNKVISYNDCAAQMFFFGAFATVENYLLASMAYDRYAAVCKPLHYATIMTKSMYTWLITGSYVISFTNSSIHIADIFTLSFCKSNVIHHFFCDVPAIMALTCFDNQVREHVLLYIESLNVFFALIVICTSYMLIFVTILKMHSASGHHKAISTCASHFTAVSIFYGTVIFMYLQPSSNHSMDTDKVTSVFYTMVIPMLNPLVYSLRNKEVKNAFIKLILHY

SEQ ID NO: 1732 - protein, 319 aa, Mus musculus
MTSMENITEVTEFILLGLTDDPNLQVPLLLIFLFIYLVTLIGNGGMMVIIFSDSHLHTPMYFFLSNLSFVDLGYSSAVAPKMVAALQSGNKVISYNGCAAQFFFFVGFATVECYLLASMAYDRHAAVCRPLHYTTTMTTGVCTILTIGSYTCGFLNASIHAADTFKLSFCGSNKINHFFCDIPPLLALACSSTHISKLVVFFVVGFNVFFTLLVIIISYFFIYIAIQNMKSSEGRKKAFSTCASHLTAVSIFYGTIIFMYLQPSSGQSMDTDKIASVFYTVVIPMLNPLIYSLRNREVKSALWKILNRFYPASFSVSRK

SEQ ID NO: 1733 - protein, 314 aa, Mus musculus
MENSTEVTEFILAGLTDDPKLQIPLFIVFLLIYLSTVLGNLGMVGLILLDSHLHTPMYLFLSHLSLVDFGYSSAVTPKVMSGLLSIDKTISHNTCGTQFFFFVGFITTESFLLAAMAYDRYAAVCKPLHYTTTMTTNTCACLTIGSYVCGFLNSSIHTGNIFRLSFCKFNVIDHFFCDAPPLLALSCSDTYISETVIFFVVGFNALFSIVVITISYLLIFITILRMRSSEGRHKAFSTCASHLTAVSIFYGTVIFMYLQPSSSHTMGTDKMASVFYTMVIPMLNPLVYSLRNKEVKGAFKKAVGNAKSALTFLF

SEQ ID NO: 1734 - protein, 307 aa, Mus musculus
MENRTEVRCFILVGLTNDPSLQLPLSITFLLIYIITLIGNLGLILMILLDSRLHTPMYIFLGNLSLVDFCYSSTVTPKVIAGFLTGDKIMSYNACASQMFFFANFGDVENYLLASMAYDRYVAVCKPLHYATTMTTHMCASLVIGCYICGFLSASIYTMDALSLSFCESNVIHHFFCDVLAVMIVSCSDSHVNELILIYVVSFNMFFALIIILISYMFIFTNILKIHSSAGYHKAVSTCASHFTAVSIFYGTIIFMYLQPSSSHTMDTDKIASVFYTMVICMLNPLVYSLRSKDVKSAFTKIVLRSK

SEQ ID NO: 1735 - protein, 314 aa, Mus musculus
MENSTEVTEFILTGLTDNPELQIPLFIVFLLIYLSTVLGNLGMVGLILLDSHLHTPMYLFLSHLSLVDFGYSSAVTPKVMPGLLSIDKTITHNACGTQFFFFVSFITTESFLLAAMAYDRYAAVCKPLQYTTTMTTNTCACLTIGSYVCGVLNSSIHTGNIFRLSFCKFNVIDHFFCDAPPLLALSCSDTSVSEMVILFVVGFNDIFSIVVIPISYLFIFITILRMRSSEGRQKAFSTCASHLTVVFIFYGSGIFMYLQPSSSHTMGTDKMASVFYTMIIPMLNPLVYSLRNKEVKSAFKKAVEKAKISLAFTF

SEQ ID NO: 1736 - protein, 312 aa, Mus musculus
MENRTEVTEFILLGVTNAPALQTPLFILFTLIYFINMTGNLGMLVLILWDSRLHTPMYIFLGNLSLVDIFYSSAVTPTVVAGLLVGNQAISYNACAAQMFLFVVFATAENFLLAAMAYDRYAAVCKPLHYTTTMTPTTCACLTMACYAGGFLNSSIHTGDTFRLYFCKSNVVHHFFCDVPAVMVLSCSDRHISEMVLLYGASFVICSALLVILISYIFIFITIFKMRSAAGYQKAMSTCVSHFTAVSIFYGTLIFMYLQPSSSHSMDTDKIVSVFYTMVIPMLNPVVYSLRNKEVKSAFKKVVEKAKYTLGF

SEQ ID NO: 1737 - protein, 312 aa, Mus musculus
MENRTEMTGFILLGLTNAPELRAPLFIIISFIYFTNVIGNLGMIVLILWDSRLHTPMYCFLANLSLVDIFYSSAVAPTILAGLLVGNIVVSYNACVAQMISFSAFVTTEDLLLAAMAYDRYAAVCKPLHYTTIMTPTVCICLIMACYAGGFLNSSIHTGDTFRLSFCGSNAVHHFFCDVPAVMTLSCSDRHVSEIVLIYGAGFIICSALLVILISYTFIFITIFRMRSAAGYQKAMSTCVSHFTAVSIFYGTVIFMYLQPTSSHSMDTDKTVSVFYTMVIPMLNPMVYSLRNKEVKSAFKKVVEKAKYSLGF

SEQ ID NO: 1738 - protein, 315 aa, Mus musculus
MMQNISELSEFILVGLTDAPFLQTPLFIIFTLIYLTTLFGNLGMIMLILLDSRLHTPMYFFLSNLSLVDCVYASAVTPKVMEGFLTGNKIISYNACAAQMFFFVAFAITENFILASMAYDRHAAVCKPLHYSTTMTTTICVLLLVGSYLSGLLHSSIHVSFTFHLSFCRSNVVNHFFCDIPPLLAVSCSSIRTNEIILFMLAGFDVAFSLLVILTSYLLISVAIVRMRSAESRKKAISTCASHLTTVSIFYGTIIFMYLQPSSNHSMDTDKLASVFYTMVIPMLNPLVYSLRNKEVKNAFKKVAGKAVLSLGLIN

SEQ ID NO: 1739 - protein, 309 aa, Mus musculus
MSLMENNTDVTQFLLLGLTDDPGLQFPLFITFLLIYTITLVGNLGMILLIVLDSRLHTPMYFFLGNLSLVDFCYSSAVTPTVMTGLIGEKIISYNDCAAQMFFFVAFATVENYLLASMAYDRYAAVCKPLHYATTMTANVCICLCIGSYTCGFLNASIHIGDTFSLSFCRSNVVHHFFCDIPAVMVLSCSDRHVSELVLVYVVSFNIFFALSVIWISYIFIFITICKMHSSSGYRKAISTCASHFIAVSIFYGTIIFMYLQPSSSHSMDTDKIASVFYTMIIPMLNPLVYSMRNKEVKSAFTKVLQVAK

SEQ ID NO: 1740 - protein, 310 aa, Mus musculus
MTSLNNLTEVTHFLLLGLTDDPGLQLPLFIIFLLIYIITLVGNLGMILLILLDSRLHIPMYFFLANLSLVDVIYSSAVTPKVMAGLIIGDNLISYNECAAQMFFFAAFATVENYLLTSMACDRYAAVCKPLYYATTMTPSVCMCFIMGCYALGFLNASVYLGNTFSLSFCKSNVVHHFFCDMPAIMALSCSDRHVNELVLIYQASFIIFFALIIILISYIIIFITILKMHSEAGVQKALSTCASHFTAVFIFYGTTIFMYLQPSSRHAMDTDKIVSVFYTMVIPMLNPLVYSLRNKEVKSAFMKVVLKEK

SEQ ID NO: 1741 - protein, 307 aa, Mus musculus
MENTTEVTWFVLLGLTNDPQLQLPLFITFLLIYIITLVGNLGIILLILLDSRLHTPMYIFLSNLSLVDFCYSSTITPKVMAGFLTGDRIISYNACASQMFFFAHFADVESYLLVSMAYDHYVAVCKPLHYATTMTTHLCVFLVIGCYICGFLNASIYTVDVFSLSFCESNVIHHFFCDVLAVMIISRSDKYINELVLISVASFNIIFSLILILISYMFIFTNILKINSSEGYRKALSTCTSHFTAVFIYYGTVIFMYLQPTSSHSMDTDKIVSVFYSIVIPMLNPLVYSMRNKEVKNAFTKVVLRSR

SEQ ID NO: 1742 - protein, 307 aa, Mus musculus
MENRTEVRCFILVGLTNDPGLQLPLFITFLLIYIITLIGNLGLILLILLDSRLHTPMYIFLGNLSLVDFCYSSTVTPKVIAGFLMGDKIMSYNACASQMFFFANFADVENYLLVSMAYDRYVAVCKPLHYATTMTTHMCVCLLIGCYICGFLNASIYTVDALSLSFCESNVVHHFFCDVLAVMIISCSDRHVNELIFVYVASFNIFFALILIIISYTFIFTNILKLQSAAGYRKAFFTCASHFTAVSIFYGTIIFMYLQPSSSHSMDTDKIASVFYTMVIPMLNPLVYSLRNKDVKSAFTKIILRSG

SEQ ID NO: 1743 - protein, 308 aa, Mus musculus
MMENQTEVTEFILLGLTDDPELQIPLFITFLAIYTITVVGNLGMILLILMDSRLHTPMYFFLGNLSLVDFCYSSAVTPKVMSGFLIGDKVISYNDCAAQMFIFAAFITVENYLLASMAYDRYAAVCKPLHYTTTMTTSVCTWLIIGSYVIGFMNASIHIGDTFHLYFCESNVVHHFFCDIPAVMVLSCSDRYASELVLVYIVSFHIFFAFIVIWISYVFIFVTIVKMQSAAGHHKAISTCASHFTAVSIFYGTSIFMYVQPSSNHSMDTDKIASVFYTMVIPMLNPLVYSLRNKEVKSALKKIILQTT

SEQ ID NO: 1744 - protein, 314 aa, Mus musculus
MENISEVTEFILVGITDAPELQIPLFIIFTLIYLIALFGNLGMIMLILLDSRLHTPMYFFLCNLSLVDCVYASAVTPKVMEGFLTGNKIISYNACAAQMFFFVAFIAIESLILASMAYDRHAAVCNPLHYTTIMTSTTCILIVTCCYMCGILQSSIHVALAFCLSFCNSNVINHFFCDIPPLLDISCSDTYTNEITVLILGTCDGILTLLVILNTYLLIFIAILRMRSVEAQRKAFSTCASHLITVSIFFGSTLFMYLQPSSNHSMNTDKIASVFYTMVIPMLNPVVYSLRNKEVKNAFKKVVGKLMTSLQLVN

SEQ ID NO: 1745 - protein, 307 aa, Mus musculus
MENRTEVTWFILVGLTNDSQLQLPLFITFLLIYTVTFVGNLGLILLILLDSRLHTPMYIFLSNLSLVDFCYSSTITPKVIAGILTGDKIMSYNACASQMFFFANFANVENYLLVSMAYDRYAAVCKPLHYATTMTKRVCASLVIGCYICGLLNASIYTMDALSLSFCESNVVHHFFCDVLAIMTTSCSDRHVNELILVYLASFNVFFALILILISYMFIFTNILKMHSASGYCKAISTCASHLTAVFIFYGTIIFMYLQPSSHHSMDTDKIASVFYTMIIPMLNPLVYSLRNKDVKSAFTKIVLRSG

SEQ ID NO: 1746 - protein, 312 aa, Mus musculus
MIARGNSTEITQFILLGFTDLPIIIILLFVTFLLIYITTLTWNLSLIVLIRMDSHLHTPMYFFLCNLSIIDLCYVTSTVPKMLSNFFQERQTNSFVGCIVQNFIFSTMGLSESCLMAAMAYDRYAAICNPLLYASIMSPTLCVLMVLASYLSGLTASLLQLFALLRLHFCGTNVIKHFFCDMPQLLVLSCTDTFFVQVLTAILTMIFGFVNMLVIMISYVYIVLSILKITSAKGRSKAFNTCASHLTAVSLFYTSSIFVYLSSSSGGSSSFDRFVSVFYTVVIPMLNPLIYSLKNREIKDAMKRLQKKTICN

SEQ ID NO: 1747 - protein, 315 aa, Mus musculus
MEAMIKGKNITEITEFILLGFSDFPQITALLFVIFLTLYITALTWNLSLVVLIRMDSYLHTPMYFFLSNLSFIDICYISSTVPKMLFNFFQKRQTISFVGCIVQYFMFSTMGLSESCLMTAMAYDRYAAICNPLLYSSVMSPTLCARMVMGSYTAGFIGSVSQVFAMLQLHFCGPNVIRHFFCDIPQLLNLSCTDTFFAHVELLILTMLFCISNALVIIISYGYIVLSILKITSAKGRSKAFNTCASHLTAVSLFYTSTAFVYFSSSSGGSSSFDRFVSVFYTVLIPMLNPLVYSLRNKEIKDAGKRLQKKLGCC

SEQ ID NO: 1748 - protein, 312 aa, Mus musculus
MIGERNITKITQFILLGFSDFPRITVPLFVMFLMIYTLAVTWNFSLIALIRLDSHLHTPMYFFLSNLSIIDICYITSTAPKMLSNFFQEKQTISFVGCIVQYFILSTMGLTESCLMTAMAYDRYAAICNPLLYSSVMSPTLCAQMVMGSYTAGLTGSVSQICALLQLYFCGPNVIRHFFCDISQLLNLSCSDAFFVQVLLAILTMCFGIANALATMLSYGFIVLSILKITSAKGRSKAFNTCASHLTAVSLFYSTAIFVYLRSSSGGSSSFDRFASVFYTVVIPMLNPLIYSLRNKEIKDAMKRLQKKKICS

SEQ ID NO: 1749 - protein, 312 aa, Mus musculus
MIGGRNITKITQFILLGFSDFPQITALLFVMFLTLYITALTWNLSLVVLIRMDSYLHTPMYFFLSNLSFIDFCYISSTVPKMLSNLFQEKQTISFVGCIVQYFIFSTMGLSESCLMTAMAYDRYAAICNPLLYSSVMSPTLCARMVMGSYTAGLVSSLSQICVLLQLHFCGPNVIRHFFCDMPQLLNLSSNDTFFAHVLLVILTMFFGLINALAIMVSYGYIASSIMKITSVNGRSKAFNTCASHLTAVSLFYSSGIFVYLSSSSGGSSSFDRFASVFYSVVIPMLNPLIYSLRNKEIKDAMNRLQKKVICS

SEQ ID NO: 1750 - protein, 315 aa, Mus musculus
MPGGRNSTVITKFILVGFSDFPKLKLVLFVIFLGSYLSTVVWNLGLIILIRIDPYLHTPMYFFLSNLSFLDFCYISSTTPKMLSGFFQKSKSISFVGCTMQYFIFSSLGLSECCLLAAMAYDRYAAICNPLLYTAIMSPSLCVHMVVGAYSTGLLGSLIQLCAILQLHFCGPNIINHFFCDLPQLLVLSCSETFPLQVLKFVIAVIFGVASVIVILISYGYIIGTILNISSVEGRSKAFNTCASHLTAVTLFFGSGLFVYMRPSSNSSQGYDKMASVFYTVVIPMLNPLIYSLRNKEIKDALQRCKNKCFSQCHC

SEQ ID NO: 1751 - protein, 318 aa, Mus musculus
MAVGRNISVVTNFILLGFLERPQLQIVLFVLFLGIYLVTLAGNLGLIVLIRMDSHLHSPMYFFLSNLSFVDVSYTSSIAPKMLCDFFREQKSITFIGCAIQLFFFVGMGGTECCLLAAMAYDRYVAISNPLLYPSLMSPTICVGMAITVYTGGFLTGLIQTSSIFRLHFCGPRVINHFFCDLPPLMSLSCSSTFFSQVVNFLVVCVVGGASALVVLVSYGYIIAAVMRIHSTHGQMKAFNTCASYLTTVILFYGSGLFSYLHSNAGYSQDKNKVVSMFYGAVIPMLNPIIYSLRNKEIKEALKKLKKRKKQMSCLCAM

SEQ ID NO: 1752 - protein, 317 aa, Mus musculus
MALTNTWNSSSVTMFIFLGFSDHPELRIFLFLTFLSIYLVTLTWNLALIFLIRGDIHLHTPMYFFLSNLSFVDICYSSSVAPKMLSDFFREQKTISFLGCGAQFFFFVGLGLTECFLLTAMAYDRYAAISNPLLYTTIMPQGLCMRMVAGAYLGGFLSSFIQASSIFQLHFCGPNVINHFFCDLPPILALSCSNTFLSQVVNFLIVITVGGTSFLILLISYSYIVSAVLKIHSVRGRWKAFNTCASHLMAVTMLFGTALFMYLRPSSSYSFSRDKVVSVFYSLVIPMLNPLIYSLRNKEIKDALWKVMERKKVFPNL

SEQ ID NO: 1753 - protein, 313 aa, Mus musculus
MEMENYTRIKELIFLGLTQSQQVSAVLFLFLLLVYVTTLLGNLLIMVTVTCESRLHTPMYFLLRNLSVADICFSSITAPKVLVDLTSNRKTISFNGCLTQMFFFHLIGGVDAFSLSVMALDRYVAISKPLHYVTIMSRGRCIGLIVASWVGGFAHSIVQISLLLTLPFCGPNVLDTFYCDVPQVIKLACTDIVVLELLMISNNGMLTTLWFFLLLVSYMVILLLLKSQSGEGKKKAISTCTTHITVVTLHFVPCIYVYARPFTALPTDKVISVTFTVISPLLNPLIYTLRNQEMKSAMRRLRKKFRFSHWIEK

SEQ ID NO: 1754 - protein, 310 aa, Mus musculus
MELRNDTRVKEFIFLGLTQSQHLSLVLCLVLCFVYVTTLLGNLLIMIIVTFESRLHTPMYFLLRNLAVLDICFSSITAPKVLVDLLAKKKTISYAKCMTQMFFFHLLGGADIFSLSVMAFDRYMAISKPLHYVTIMSSKRCTALIAASWVGGFVHSIVQISLLLPLPFCGPNVLDTFYCDVPQVLKLACTDTFVLELLMISNNGLVTTLWFIFLLVSYMVILMMLRSQAGEDRRKAISTCTSHITVVTLHFVPCIYVYARPFTALPTDKAISVTFTVISPLLNPLIYTLRNQEMKSAIRRLKRKLTPLEK

SEQ ID NO: 1755 - protein, 311 aa, Mus musculus
MELGNHTKVTEFIFCGLTQSQELSLLLFFFLSIVYITTVLVNVTIMVTVTWESRLHTPMYFLLRNLSVLDICFSSITVPKVLVDLLSRRKTISFNGCFTQIFFFHLLGGADIFSLSVMAFDRYMAIFRPLHYVTIMSRGRCTALIAASWVGGFVHSIVQIFLLLPLPFCGPNVVDSFYCDVPQVLKLACTDTFVLELLMISNNGLITTLWFVLLLVSYTVILTMLRSHTGEGRKKAISTCTSHITVVTLHFVPCIYVYARPFTALPMDRAVSITLNIIVPVLNPMIYTLRNQEMKSAMKRLRKRLILSEVE

SEQ ID NO: 1756 - protein, 314 aa, Mus musculus
MSQINHTNVKEFVFLALTRIRELEFFLFSVFFLVYVTTVLGNTLIVVTITAESRLHTPMYFLLRNKSILDIVFSSITVPKFLVDLLSERKAISYNGCLTQIFFFHFAGGADIFFLSVMAYDRYLAIAKPLHYVTIMRREVWLALVVASWVGGGLHSIVQIILMLPLPFCGPNTLDAFYCDIPQVVKLACTDTFALELLMISNNGLVTLLWFFLLLGSYTIILVMLRSHSGEGRNKALSTCTSHIMVVTLHFVPCVYIYCRPFTTLPMDTAISINNTVITPMLNPMIYTLRNQEMKSAMKRLQRRLGPSESNKLG

SEQ ID NO: 1757 - protein, 320 aa, Mus musculus
MGDRETSNHSDMTDFILVGFRVSPELHILLFLLFLLVYAMILLGNLGMMAIIMTDPRLNTPMYFFLGNLSFIDLFYSSVIAPKAMSNFWTESKSISFAGCVAQIFLFALFIVAEGFLLAAMAYDRFIAICNPLLYSVHMSTRLCTQLVAGSYFCGCISSVLQTSMTFTLSFCASRAIDHFYCDSRPLQRLSCSDIFIHKIVSFSLSGIIILPTITVIIVSYMYIVSTVLKIRSVEGRKKAFSTCSSHLGVVSVLYGAVFFMYLTPDRFPELSKLASLCYSLVTPMLNPLIYSLRNKDVRDALSKLLEKKKCSGSFFPFYK

SEQ ID NO: 1758 - protein, 313 aa, Mus musculus
MGDRETSNHSDMTDFILVGFRVSPELHILLFLLFLLVYAMILLGNLGMMAIIMTDPRLNTPMYFFLGNLSFIDLFYSSVIAPKAMSNFWTESKSISFAGCVAQLFLFALFIVAEGFLLAAMAYDRFIAICNPLLYSVHMSTRLCTQLVAGSYFCGCISSVLQTSMTFTLSFCASRAIDHFYCDTRPVQRLSCNNLFVHKIVSFSLSSIIILPTVIVIIVSYMYIVSTVLKIRSVEGRKKAFSTCSSHLGVVSVLYGAVFFMYLTPDRFPELSKLASLCFSLVTPMLNPLIYSLRNKDVRDALSKLLEKKKFIL

SEQ ID NO: 1759 - protein, 312 aa, Mus musculus
MANHSSVTKFILLGLTNDINLQAVLFLFLILTYILSVMGNSAIILLTLLDHRLQTPMYFFLRNFAFLEISFTSVFVPKMLINIGTGDKTISFAGCFTQYFFAILLGATEFYLLAVMSYDRYVAICRPLHYTTIMSRRLCFQLVLSSWLSGFIVVAVPHAMTLQLPFCASNIINHYCCDYTILLHLSCSDTHFIEVIQFLLAAVTLILTLLLVILSYTHIIKTILRIPSAQQRKKAFSTCSSHMIVVSLSYGSCIFMYINPSFKDAANFNKRVAVLNTSVAPLLNPFIYTLRNKQVKIAFKDMLSKTISFFKK

SEQ ID NO: 1760 - protein, 315 aa, Mus musculus
MKLEQSRNYTELTDFILLGFWTSPEAQVPLFLLFLFIYLVILLGNLSMLTVIKIDSRLHTPMYFFLQNLSFLDLCYSTVIAPKTLATIFSKEKKISYNECATQFFFFALFVGTEGFLLAVMAYDRFSAICSPFLYTVHMSQPACIRLVAGSYICGCINSMIQTGFTFSLRFCGENRLDHFFCDVPALIKISCVDTFVNEIVLFILSALIIISTITIILVSYAYILSTVLKIPSTHGRSKTFSTCGSHIAVVSLFYGTVFFMYAQPGSISSPEKSKIVAVFYTLIIPMLNPLIYSLRNTEVKSALKKTLLRKISWQ

SEQ ID NO: 1761 - protein, 315 aa, Mus musculus
MKLEQSRNYTELTDFILLGFWTSPEARVPLFLLFLFIYLVIVLGNLSMLTVIKIDSRLHTPMYFFLQNLSFLDLCYSTVIAPKALATFFSKEKKISYNECATQFFFFALFVGTEGFLLAVMAYDRFSAICSPFLYTVHMSQPACIRLVAGSYICGCINSMIQTGFTFSLRFCGENRLDHFFCDVPALIKISCVDTFVNEIVLFILSALIIISTITIILVSYAYILSTVLKIPSTHGRSKTFSTCGSHIAVVSLFYGTVFFMYAQPGSISSPEKSKIVAVFYTLIIPMLNPLIYSLRNTEVKSALKKTLLRKIPWH

SEQ ID NO: 1762 - protein, 312 aa, Mus musculus
MKNHTEVTVFILAGLTDDPQWKVVLFIFLLLTYLLSVTGNLTIITLTLVDTHLKTPMYFFLRNFSFLEFSYTTTCIPKLLVTMATGDKTISYGNCVTQVFFAFLFGASEFYLLAAMSYDRYVAICKPLHYMTIMNNKVCVQLVLSCWLAGFFVIFPPLVLGLNLEFCASNIVDHFYCDTTPLLQISCTDTQLLETMGFVSALVTLLLTLVMVIISYTYIAITILKIPSTEQRKKAFSTCSSHMIVISISYGSCIFMYVKPSVKQRISISKGISVLNTSVAPLLNPFIYTLRNQQVKKAFITTVHRIASSSKK

SEQ ID NO: 1763 - protein, 312 aa, Mus musculus
MKNHTRVTIFIIAGLTDDPQWKVVLFIFLLLTYLLSITGNLTIITLTLVDTHLKTPMYFFLRNFSFLEISYTTTCIPKLLVTMATGDKTISYNNCAAQVFFAFLLGASEFYLLAAMSYDRYVAICKPLHYMTIMSNKVCVQLVLSCWLISFLIIFPPLVLGLNLDFCASNIIDHFYCDTTPLLQISCTDTQLIETIAFISALVTLLLTLVMVIISYTYIAMTILKIPSTSQRKKAFSTCSSHMIVISISYGSCIFMYVKPSVKQRVSISKGISVLNTSVAPLLNPFIYTLRNQQVKRAFINTVHRIVSFSKK

SEQ ID NO: 1764 - protein, 316 aa, Mus musculus
MISQREMKNHTRQIEFILLGLTDNPQLQTLIFVSLLLNYLLSMLGNLAIIALTLLDPILKTPMYFFLRNFSFLEILFTTTCIPRFLISIVTQEKTISYNGCVCQLFFYIFLGATEFFFLATMSYDRYIAICKPLHYASIMNSKVCHQLVLGSWVTGFLVIFPPLIIGLDLDFCASNVIDHFLCDVSPLLQLSCSNTNLLDLMAFILALMTLIVTLVIVIFSYAHIAKTIMKFPSVQQKKKAFSTCSSHMIVVSLTYGSCIFIYIKPSANERVTLSKGIAVLNTSVAPLLNPFIYTLRNKQVKQACGVVLRKIFSAS

SEQ ID NO: 1765 - protein, 324 aa, Mus musculus
MSLFPQRNLDAMNRSAAHVTEFVLLGFPGSWKIQIFLFVLFLVFYVLTLLGNGAIICAVRCDSRLHTPMYFLLGNFSFLEIWYVSSTIPNILANILSKTKAISFSGCFLQFYFFFSLGTTECLFLAVMAYDRYLAICRPLHYPTIMTRRLCCILVSSCWLIGFLGYPIPIFSISQLPFCGSNIIDHFLCDMDPLMALSCAPAPITEFIFYAQSSFVLFFTIAYILRSYILLLRAVFQVPSAAGRRKAFSTCGSHLVVVSLFYGTVMVMYVSPTYGIPILMQKILTLVYSVMTPLFNPLIYSLRNKDMKLALRNVLLGMRIVKNM

SEQ ID NO: 1766 - protein, 309 aa, Mus musculus
MKTLSSSNNTITGFILLGFPCPREGQILLFVLFFIVYLLTLMGNASIICAVCCDQKLHSPMYLLLANFSFLEIWYVTSTVPNMLANFLSENKVISFAGCFLQFYFFFSLGSTECFFLAVMAFDRYLAICRPLHYPSLMTGRLCNILVISCWVLGFLWFPVPIIIISQMSFCGSRIIDHFLCDPGPLLALTCSRAPLMEFFWAILSSMLLFIPFFCIMGSYILVLRAVFRVPSRDGQKKAFSTCGSHLTVVSLFYGSVMIMYLSPTSEHEAGMQKLVTLFYSVVTPLINPVIYSLRNKDMKNALQKILKT

SEQ ID NO: 1767 - protein, 311 aa, Mus musculus
MKAFSSPSNSSIITGFILLGFPCPKEGQILLFVLFFIIYILTLMGNASIICAVCYDKKLHSPMYLLLANFSFLEIWYVTSTVPNMLANFLSDTKVISFSGCFLQFYFFFSLGSTECFFLAVMAFDRYLAICRPLHYPSLMTGRLCNILVISCWMLGFLWFPVPIIIISQMSFCGSRIIDHFLCDPGPLLALTCVRNSLIEMTSSTLSSLLLFVPFFFIMGSYALVMRAVLRVPSAAGRRKAFSTCGSHLTVVSLFYGSVMVMYVSPTSEHAAGVQKLVTLFYSVVTPLLNPVIYSLRNRDMKHAMKKLLKM

SEQ ID NO: 1768 - protein, 311 aa, Mus musculus
MKTFSSPSNSSTTTGFILLGFPCPREGQILLFVLFSIVYLLTLMGNTCIIFAVCWDQRLHTPMYLLLANFSFLEIWYVTSTVPNMLANFLSDTKVISFSGCFLQFYFFFSLGSTECLFLAVMAFDRYLAICRPLHYPALMTGSLCNILVISCWVLGFLWFPVPIIIISQMSFCGSRIIDHFLCDPGPLLALTCSRAPLMEVFWTIITSLILFVPFLFIMGSYTLVLRAVFRVPSRDGQKKAFSTCGSHLTVVLLFYGSVMIMYLSPTSEHEAGMQKLVTLFYSVVTPLVNPVIYSLRNKDMKHALQKILRT

SEQ ID NO: 1769 - protein, 312 aa, Mus musculus
MTSARNASHTVSHFILLGFPCRREIQIFLFSIFFMIYILTLLGNMAIVYAVYWDHRLHTPMYILLANFSFLEICYVNSDVPNMLVNFLSTTKTISFTRCLLQLYFFFSLGTTECLFLSIMAYDRFLAICRPLHYPTVMTTMFCGNLVIFCWVYGFLWFLIPVILITQLPFCGPNVIDDFLCDLGPLLALASVCVPIPGTVLICGTMSSLLIFGTFFYIIGSYTLVLRAVIRMPSSAGSKKAFSTCSSHLAVVFLFYGSVMITYVSPGSGQAKGMQKFTTLFYSVMTPFFNPMIYSLRNKEMKDALKKVVGGS

SEQ ID NO: 1770 - protein, 308 aa, Mus musculus
METENRTVVTEFILIGLTQSHDIQRLVFVLSLIFYIIILPGNILIILTIRSDPGLTAPLYFFLGNLAFLDASYSFIVAPRMLVDFFSEKKIISYKACITQLFFLHFLGGGEGLLLVVMAFDRYIAICRPLHYSTVMSPRACYVMLLALWLGGFIHSIIQVVLILRLPFCGPNHLDNFFCDVPQVIKLACTDTFAVELLMIFNSGLLTLLCFLGLLTSYAVILCHVHRSASEGKNKAISTCTTHVIIIFIMFGPAIFIYTRPFTALSADKVVSFFHTVIFPLMNPVIYTLRNQEVKTSMKKLIIRHIIC

SEQ ID NO: 1771 - protein, 313 aa, Mus musculus
MEPANDTTVTEFILTGLSQTREVQLVLFVIFLSFYLFILPVNILIICTIRLDSHLSSPMYFLLANLAFLDIWYSSITAPKMLVDFFVERKIISFGGCIAQLFFLHFVGASEMFLLTVMAFDRYAAICRPLHYATIMNRRLCCILVALSWTGGFVHSIIQVALIVRLPFCGPNELDNYFCDITQVVRIACANTFLEEMVMIFSSGLISVVCFIALLMSYAFLLTMLKKHSSSGESTSRAISTCYSHITIVVLMFGPSIYIYARPFDSFSLDKVVSVFHTVIFPLLNPIIYTLRNKEVKAAMRKLVNRYIFCKEK

SEQ ID NO: 1772 - protein, 308 aa, Mus musculus
METENRTVVTEFIFTGLTESLDIQRLVFVLSLIFYIIILPGNVFIILTIISDPGLTAPLYLFLGNLAFLDASYSFIVAPRMLIDIFSEKKIISYKACITQLFFLHFLGGGEFLLLVVMAFDRYIAICRPLYYSTVMNPRVCYVMLLAPWLGGFIHSIIQVVLILRLPFCGPNHLDNFFCDVPQVIKLACTDTFAVELLMIFNSGLLTLVCFLGLLTSYAVILCHVHRSASEGKNKAISTCTTHVIIIFLMFGPAIFIYTRPFTALSADKVVSFFHTVIFPLLNPVIYTLRNQEVKTSMKKLFIRQVIC

SEQ ID NO: 1773 - protein, 312 aa, Mus musculus
MNNHSSSSSSTSDFILLGLSTNPWMQKPLFGIFIIMYLVTVMGNVLIILVIRSDSRLHTPMYFFLSNLSFMDICFTTVIVPKMLVNFLSETKTISYVGCLVQMYFFMALGNTDSYLLASMAIDRLVAICNPLHYDVVMRPQRCLLMLLGSCTISHLHALFRVLLMSRLSFCASHVIKHFFCDTQPVLKLSCSDTSSSQIVVMTETLAVIVTPFLCILFSYMRIIVTVLRIPSAAGKWKAFSTCGSHLTVVVLFYGSIIYVYFRPLSMYSVVKDRVATVMYTVVTPMMNPFIYSLRNKDMKRGLRKLMGKVHL

SEQ ID NO: 1774 - protein, 318 aa, Mus musculus
MDGSTLQSPQQNHSTFVAFILLGFSDVPNLQEFLFGLFLMVYLIILMGNSLIIIIIRADPSLQTPMYFFLGNFSFLEMCYVSVTLPRLLTDLYRQDRIISFMACATQMYFFLIFGATECFILTAMAYDRYVAICNPLLYPLIMNNSLCIQLAAGCWISGVPVHIGFTYWIFSLPFCGSNQLNHFFCDIPPVLTLACGDTFMIEMLIYVIALLVVTIPFMLILASYVKIISSILKLPSATGRAKAFSTCSSHLIVVALFFGSGIITYLRPKSSHSAGVDKFLSLFYTVVTPMFNPMIYCLRNKDVMIALKKIFLRCFML

SEQ ID NO: 1775 - protein, 310 aa, Mus musculus
MDEGNCSSNTEFVLLGITNNPSMKVGLFIVFLIIYLIILVANIGMIVLIKLDPQLHTPMYFFLSHLSFSDLCYSTAVGPKMLVDLMVKQKIIPFVGCALQFFFTCIFVDAECMLLAVMAFDRYKAISNPLMYVVGMSSKFCYQLLAGVYLVGMIDTVIHTIMTFGLCFYGSNEINHFFCDIPPILLLSCSDTQTNELITFVIFGFIELSTISGVLVSYCYIISSVLKIRSTDGRFKAFSTCASHLTAVAIFQGTLLFMYFRPASAYSLDQDKITSLFYTLVIPMLNPLIYSLRNKDVQEALQKLKKKIFF

SEQ ID NO: 1776 - protein, 310 aa, Mus musculus
MDKRNCSSVPEFLLLGITNKPEMKVALFIVFLIVYLTILLTNVGMITLIRMDPQLHTPMYFFLSHLSFSDLCYSTAVGPKMLLDLLEDNNPISFVGCFLQLLIVSIFIDVECMLLAVMAFDRYKAISNPLMYAVDMSSRVCYQFLTAIYVFGTIDGFIHTSLAFSLCFCHSTQINHFFCDLPPVLLLSCSDTHINELVLFMLFGFIELSTISGVLVSYCYIISSVLKISSTGGWFKAFSTCASHLTAVGIFQGTMLFMYFRPSSAYSLDQDKMTSIFYLLVIPMINPLIYSLRNKDVKEALVRLRSKWWF

SEQ ID NO: 1777 - protein, 309 aa, Mus musculus
MDIGNCSLNEFIFVGVTNNPEMKGTLFTIFLLIYLINLLGNIGMIILIRMDPQLHTPMYFFLSHLSFCDLCYSTAIGPKMLLDMFGKNKSIPFWGCALQLFIFCVFADSECVLLAVMAFDRYQAISNPLLYTANMSSRKCFMFMAGVYLVGTADALIHTTLAFRLCFCGSNEINHFFCDLPPLYLLSCSDTQVNYLALFTIYGFLELSTISGVLVSYCYIISSILKIRSAEGRFKAFSTCTSHLTAVAIFQGTLLFTYFRPSSSYSLDQDKMTSLFYTLVIPMLNPLIYSLRNKDVKEALKKIKRKRWF

SEQ ID NO: 1778 - protein, 307 aa, Mus musculus
MNIGNCSLNEFIFVGVTNNPEMKGTLFTIFLLIYLINLLGNIGMIILIRMDPQLHTPMYFFLSHLSFCDLCYSTAIGPKMLVDMFGKNKSIPFWGCAVQFFISCTFADSECVLLAVMAFDRYQAISNPLLYTANMSSRKCFMFMAGVYLVGTSDALIHTTLAFRLCFCGSNEINHFFCDLPPLYLLSCSDTQVNYLALFTIYGFLELSTISGVLVSYCYIISSVLKIRSAEGRFKAFSTCTSHLTAVAIFQGTLLFTYFRPSSSYSLDQDKMTSLFYTLVIPMLNPLIYSLRNKDVKEALGKMKRKR

SEQ ID NO: 1779 - protein, 310 aa, Mus musculus
MRANQTWITEVTLLGFQADLSVECFLFGLFSLFYSFTLLGNGIILVVICLDNRLHIPMYFFLSHLAIVDMSYASNNVPKMLANLVTQRRTISFILCIMQTFLYLAFACTECLILVVMSYDRFVAICHPLHYTVIMSWKVCTILAAVSWIAGFLLALVHLVLILKLPFCGPHEINHFFCEILSVLKLACADTTLNQVVILAACVFILVGPLCLVLVSYTRILVTILRIQSGEGRRKAFSTCSSHLCVVGLFFGSAIVMYMAPKSQHPELQQKILSLFYSLFNPMLNPLIYCLRNAEVKGALRRSLWKERPM

SEQ ID NO: 1780 - protein, 310 aa, Mus musculus
MRANQTWITEVTLLGFQADLAVECFLFGLFSLFYSFTLLGNGIILVVICLDNRLHTPMYFFLSHLAIVDMSYASNNVPKMLANLVTQRRTISFIPCIMQTFLYLAFASIECLILVVMSYDRFVAICHPLHYTVIMSWRVCTIMAAVSWIVGFLLALVHLILILRLPFCGPHKVNHFFCEILSVLKLACADTTLNQVVIFAACVFILVGPLCMVLVSYTRILVAILRIQSGEGRRKAFSTCSSHLCVVGLFFGSAIVMYMAPKSQHPEMQQKILSLFYSLFNPMLNPLIYCLRNAEVKGALRRSLLKERSM

SEQ ID NO: 1781 - protein, 310 aa, Mus musculus
MKANQTWITEVTLLGFQADLAVECFLFGLFSLFYSFTLLGNGIIFGIICLDHRLHTPMYFFLSHLAIVDMSYASNNVPKMLANLVTQRRTISFIPCLMQTFLYLAFAHIECLILVVMSYDRFVAICHPLHYTVIMSWRVCTILAAVSWIFSFLLALVHLVLILRLPFCGPHEVNHFFCEILSVLKLACADTTLNQVVIFAACVFILVGPLCLVLVSYTRILVAILRIQSGEGRRKAFSTCSSHLCVVGLFFGSAIVMYMAPKSQHPELQQKILSLFYSLFNPMLNPLIYSLRNAEVKGALRRSLLKERSM

SEQ ID NO: 1782 - protein, 313 aa, Mus musculus
MKENQTMVTEFILLGFCLGPRIHVILFALFSVCYIFTLLGNGFTLGLICLEPRLHSPMYFFLSNLATVDIAYACNTVPQTLVNLLDETKPISFAGCMMQTYLFLTFGSTECVLLVVMSYDRYVAICHPLHYTVIMNWRVCTIMAAVSWIFSFLLALVHLVLILRLPFCGPHEVNHFFCEILSVLKLACADTTLNQVVIFAACVFALVGPLCLVLVSYTRILVTILRIQSGEGRRKAFSTCSSHLCVVGLFFGSAIVMYIAPKSQHPEELQKILFLFYSFFNPMLNPLIYSLRNAEVKGALRRSLCNENHSQLV

SEQ ID NO: 1783 - protein, 310 aa, Mus musculus
MGNNMTLITEFILLGFPLSPRMQMLLFALFSLFYAFTLLGNGTIVGLICLDSRLHTPMYFFLSHLAIVDIAYACNTVPQMLVNLLDPVKPISYAGCMTQTFLFLTFAITECLLLVVMSYDRYVAICHPLRYSAIMSWRVCSTMAVTSWIIGVLLSLIHLVLLLPLPFCVSQKVNHFFCEITAILKLACADTHLNETMVLAGAVSVLVGPFSSIVVSYACILGAILKIQSEEGQRKAFSTCSSHLCVVGLFYGTAIVMYVGPRHGSPKEQKKYLLLFHSLFNPMLNPLIYSLRNSDVKNTLKRVLRTQRAL

SEQ ID NO: 1784 - protein, 310 aa, Mus musculus
MMRRNHTVISEFVFQGFSSFQEYKFTLFMVFLTLYLLTLTGNAIIMIIIGIDRHLHTPMYFFLSMLSTSETVYTLVIVPRMLASLVGSSQSISLAGCATQMFFFITLAINNCFLLTAMGYDRYVAICNPLRYSVIMNKRVCAQLVWGSCNIGLLVAIIQIASVFRAPFCDREVAHYFCDIRPVMKLSCADTTLHDIVNFIISSLVIVVPMGLVFISYILIISTILKIASAEGRKKAFATCASHLTVVIIHYGCASIAYLKPKSENTRDQDQLISVTYTVFTPLLNPVVYTLRNKEVKDAIYRAIGKKPLA

SEQ ID NO: 1785 - protein, 316 aa, Mus musculus
MAYEVMNQTSATTFILVGFSEYPQLQKPLFLLFLAIYSVTLVGNLGILVVIKVNPKLHTPMYFFLSHLSFLDICYSSVFTPKLLQILIMEDRTVSFKACMVQFFFICTFVITEMFMLAVMAYDRFVAVCNPLLYTVVMPFQFCALLVAGTYMIGGLCTVILLYTLLQLSYCEYGIINHFGCEYSAVISVSCSDSSFSQLTSLVIAIVSESSSVLITLASYVFIVVTIIKMPSKGGLRKAFSTCTSHLTAISIFHGIILLLYCVPNSNSSQLFVKVATALYTIMIPMLNPLIYSLRNKDVKDTVRRLISSKLHSHLT

SEQ ID NO: 1786 - protein, 319 aa, Mus musculus
MQKPKFLQIMSVENSTVKTEFYLLGFSDHPELQSLLFAVFFSIYSITLMGNIGMIVLITVSPNLHIPMYFFLCMLSFIDACYSSVIAPKLLVDLISDKKVISYNGCATQLYFFCSLVDTESFLLAAMAYDRYIAICNPLLYTVIMSKRVCIQLAFGAFLGGTMSSIIHTTNTFQLSFCSKVINHFFCDVSPLFSLSCFDTYTHDIILVVFASLVEALSLLTVLLSYMYIIVAICKIGSAEGRKKGFSTCASHLAVITIYHGTLIFIYLRPSTGHSMNIDKMTSVFYTLIIPMLNPLIYSLRNKDVKFAFRKIISKKLFT

SEQ ID NO: 1787 - protein, 316 aa, Mus musculus
MMLDLGNESSVTMFILSGFSEYPHLHAPLFLLFFMIYTVTLIGNLGIIVVRKVNPKLHTPMYFFLSHLSFLDICYSSVFTPKLLEILIVEDRTISFKGCMTQFFFICAFVITEMFMLAVMAYDRFVAVCNPLLYTVSMSPKLCAFLVAGTYMWGVLCSLTITYSLLQLSYCGPNIINHFGCEYSAILSLSCSDPTFSQVVCLTISIFNETCSLLIILASYVFIVVTIIKMPSKGGLQKAFSTCSSHLTAISIFHGIILLLYCVPNSKNSWLVVKVATVLFTVMIPMLNPLIYSLRNKDVKGTVSRLMHLKLQAHST

SEQ ID NO: 1788 - protein, 310 aa, Mus musculus
MSVENSTVKTEFYLLGFSDHPELQSLLFAVFFFIYSITLMGNIGMILLITVSPNLHIPMYFFLCMLSFIDACYSSVIAPKLLEDLISDKKVISYNGCATQLYFFCSLVDTESFLLAAMAYDRYIAICNPLLYTVIMSKRVCTHLAFGAFLGGTMSSIIHTTNTFQLSFCSKVINHFFCDISPLFSLSCTDTYTHDIILVVFASLVEAVSLLAVLLSYMYIIVAILKTGSAEGRKKGFSTCASHLTVVTIYHGTLIFIYLRPSTGHSMDIDKMTSVFYTLIIPMLNPLIYSLRNKDVKFAFRKIMSKKSFS

SEQ ID NO: 1789 - protein, 316 aa, Mus musculus
MIMEFTSGNYTLVTEFILLGFPTRPELQIILFLVFLTLYGMILIGNIGLMLLIRTDPHLQTPMYFFLSNLSFVDLCYSSVIVPNMLVNFLSAKKSISYLGCALQFYFFCTFADTESFILAAMAYDRYVAICNPLLYTVAMSRSLCIWLIVLSYVGGNMSSLVHTSFAFILKYCDKNIINHFFCDLPPLLKLSCTDTSINEWLLSTYGSSVEIICFFIIIISYFFILLSVLKIRSTSGRKKTFSTCASHLTSVAIYQGTLLFIYSRPSSLYSPNTDKIISVFYTIIIPVLNPLIYSLRNKDVKDAAKKALRSKIQSP

SEQ ID NO: 1790 - protein, 313 aa, Mus musculus
MSVENSTVKTEFYLLGFSDHPELQSLLFAVFFSIYSITLMGNIGMIVLITVSPNLHIPMYFFLWMLSFIDACSSSVIAPKLLVDLISDKKVISYNGCATQFYFCCSLVDTESFLLAAMAYDRYIAICNPLLYTVIMSKRVCTQLAFEAFLGGTMSSIIHTTNTFQLSFCSKEINHFFCDMTPLFSLSCFDTYTHDIILVVFASLVEAVCLLAVLLSYMYIIVAILKTGSAEGRKKGFSTCASHLAVITIYHGTLIFIYLRPSTGHSMDIDKMTSVFYTLIIPMLNPLIYSLRNKDVKFAFRKIISKKLFFLVI

SEQ ID NO: 1791 - protein, 316 aa, Mus musculus
MVPLEINVSVEINFVLLGFTDYPNLQIPLFLIFLFMYIITVVGNLGMTVLINIDHKFHTPMYFFLSHLSFVDFCYSTIITPKLLENLVLADKTILYFSCMLQYFLSCVALVSESYLLAVMAYDRFVAICNPLLYTVAMSPRLCILLVTGSYIWSTFETLILLCYALQLKFSRFNVINHFFCEYTALIVVSSSDIHIPSLLLFCFATFNEVSTLLIILTSYVLIFVTVLKIKSASGRRKAFSTCASHLTAITIFHGTILSLYCVPNSKNSRNAVKVASVFYAVVNPLLNPLIYSLRNKDVKEVFQKLVSTSLKFQLH

SEQ ID NO: 1792 - protein, 313 aa, Mus musculus
MTLSDGNHSGAVFTLLGFSDYPELTIPLFLIFLTIYSITVVGNIGMIVIIRINPKLHIPMYFFLSHLSFVDFCYSSIVAPKMLVNLVTMNRGISFVGCLVQFFFFCTFVVTESFLLGVMAYDRFVAIRNPLLYTVAMSQRLCAMLVLGSYAWGVVCSLILTCSALNLSFYGFNMINHFFCEFSSLLSLSRSDTSVSQLLLFVFATFNEISTLLIILLSYVLIVVTILKMKSASGRRKAFSTCASHLTAITIFHGTILFLYCVPNSKNSRHTVKVASVFYTVVIPMLNPLIYSLRNKDVKDTVKKIIGTKVYSS

SEQ ID NO: 1793 - protein, 314 aa, Mus musculus
MILTDINLTSEVTFALLGFSDYPELQVPLFLLFLAIYSFSVVGNIGMMIIIKINPKLHTPMYFFLSHLSFADFCYSSIIAPKMLVNLVVEDRTISFLGCIMQFFFFCTFVVTELILFAVMAYDRFVAVCNPLLYTVVMSQRLCALLVLGSYAWGVVCSLTLTCSALNLYFRGFNTINHFFCELSSLIALSCSDSHLTQLLLFIVATFNEISTLLIILTSYLFIVVTALKMHSSSGHRKVFSTCASHMTAITIFHGTILFLYCVPNSKNSRHTVKVASLFYTVVIPMLNPLIYSLRNKDVKDTVSKLMNVRKFSQ

SEQ ID NO: 1794 - protein, 311 aa, Mus musculus
MDEGNCSSITEFILLGITDDPSMKVVLFISFLIIYLIILVANIGIIVLIRIDPQLHTPMYFFLSHLSFSDLCYSTAVGPKMLVDLLAKHKSLSFLGCALQFFFTCVFIDVECVLLAVMAFDRYKAISNPLMYVVDMSSRFCYQLLAGVYVLAMIDTLMQTIITFGLCFCRSNEINHFFCDLPPILLLSCSDIYVNELALFVFSGFVELCTISGLLVSYSYIIASVLKISSDEGRFKAFSTCASHLTAVAIFQGTLLFMYFRPSSSYSLDQDKTTSLFYTLVIPMLNPLIYSLRNKDVKEALYKLRNKRSFK

SEQ ID NO: 1795 - protein, 326 aa, Mus musculus
MNSVVSSNRSQVWNEGNRSMVASFILLAFSEFPNLQLPLFLVFLIMYMVTVLENLGMIFIIRMNPKLHTPMYFFLSHLSFVDFCYTSVIAPKLLDLLIVEDKSISFEGCMAQYFLGCTFVIIEMFMLAVMAYDRFVAVCNPLLYTVAMSHELCSLLVVITYIWAGIFSSTLTYILLQLSYCGPNVIDHFCCEYSALLSVSCSDTSFSQMACLVISMFNEACCLLIIITSYVFIVVTVIKIPTKGAFRKAFSTCASHLTAIGVCHGIVLLLYCVLKSKSSLFLVKVATVFHSMVIPMLNPLIYSLRNKDVKETVRKLIYLKCIFHSI

SEQ ID NO: 1796 - protein, 318 aa, Mus musculus
MQFIKQRRMEVGNCSATEFLLLGITNNPVIKVILFTTFLIVYLIILIENLGMIILIRMNSQLHTPMYFFLSHLSFSDICYSTAVGPKMLVGLIFKNNSIPFIDCAVQFFIFCIFTDAECVLLAVMAFDRYKAISNPLMYAVDMSRVVCYQLLAVVYLVGMVDALTHTTLTFHLCFCQSKEINHFFCDVPPLLLLSCSDTEVNELVIFTLFGFIELSTISGVLVSYCYIISSVLKIRSAEGRFKAFSTCTSHLTVVAIFQGTMLFMYFRPSSAYSLDQDKMTSLFYTLVIPMLNPLIYSLRNKDVKASVKRSLQSRISF

SEQ ID NO: 1797 - protein, 311 aa, Mus musculus
MDKGNCSTLTEFLLLGITSNPEVKVFLFTMFLVVYLTNLLTNLGMIILIRMDPQLHTPMYFFLSHLSFSDLCYSTAVGPKMLVDLLSKNTSIPFLGCAMQFFTFCIFIDAECVLLAVMAFDRYKAISNPLLYAVDMSRKVCFQLLTGVYSVALADALIHTTLTFHLCFCGSNEINHFFCDIPPVLVLSCSDTQVNVLVIFTVFGFIELSTISGVLISYCYIISSVLKISSAAGRLKAFSTCTSHLTAVAIFQGTMLFMYFRPSSSYSLDQDKVTSLFYTLVIPMLNPLIYSLRNKDVKEALQRIRSKMCLK

SEQ ID NO: 1798 - protein, 308 aa, Mus musculus
MDRGNCSSVDEFIFLGITNNPVKKVALFTTFLVVYLITLLANLGIIILIRMNTQLHTPMYFFLSNLSFCDFCYSTAIGPKMLVDLLAAEKSIPFFGCAVQFLIFCVFADSECLLLAVMAFDRYQAISNPLLYTVNMSSMVCFMLMTGVYLVATTDGLIHTILAFRLCFCGSNEINHFFCDLPPLYLLSCSEIQVNELALFTVFGFIELSTISGVLVSYCYIILSVLKIRSAEGRFKAFSTCTSHLTTVAIFQGTMLFMYFRPSSSYSLDQDKMTSLFYTLVIPMLNPLIYSLRNKDVKEALQRLKMKM

SEQ ID NO: 1799 - protein, 311 aa, Mus musculus
MDKENCSSLPELLLLEITNNPDMKVLILTVFLAINLIVLIINIGMIIFIKMNPQLQTPMYFFLSHLFFSDLSYSSAIGSKMLIDIFSKYKTIPLLFVPFDSFFVCIFIDVECVLPAVMAFDQYKAISHPVIYAIDMSNRVCYQFLAGVYLVGMTDALIHRTLTFCLCFCESHEINHFFCDIPPILLLSCLNTQFNELMIFTIFGFIQLSTISEVLVSYCSIILSVLKIHSAKGRFKAFSTCTLHLTAVAIFQGTLLFTYFQPSTSYSLDQDKMTSLFYTLMIPMLNPLIYSLRYKDVKETLQNLENKRWCK

SEQ ID NO: 1800 - protein, 315 aa, Mus musculus
MIQNISELSEFILVGLTDAPFLQIPLFIIFTLIYLTTLFGNLGMILLILLDSRLHTPMYFFLSNLSLVDCVYASAVTPKVMEGFLTGNKIISYNACAAQMFFFAAFATVESFMLASMAYDRHAAVCKPLHYSTTMTTTICVLLLAGSYVSGLLQSSIHVSFTFQLSFCHSNVVNHFFCDIPPLLALSCSSIHTNEIILFMLAAFNVAFTLLVILSSYLLIFVAILRMRSAESRKKAISTCASHLTTVSIFYGTIIFMYLQPSSNHSMDTDKMASVFYTMVIPMLNPLVYSLRNKEVKNAFKKVAGKAVLSLGLVN

SEQ ID NO: 1801 - protein, 313 aa, Mus musculus
MHNISEVTEFILVGLTDAPGLQVPLFIIFTFIYLTTLFGNLGMIVLILLDSSLHTPMYFFLSNLSLVDCVYASAVTPKVIEGFLTEKKIISYNACATQMFFLIGFAIIEGFLLASMAYDRHAAVCKPLYYSTSMTTTICTLLIVGSYISGLLQSSIHVAFTFHLSFCHSNVVNHFFCDIPPLLALSCSSVYINEIVLFILAALNIALTILVIVNSYVLIFVAILRMRSTDGQKKAISTCASHLTTVSIFYGTIIFMYLQPSSTHSMDTDKVASVFYTMIIPMLNPLVYSLRNKEVKNAFKKVTRKVLFSLGLV

SEQ ID NO: 1802 - protein, 315 aa, Mus musculus
MADNGTRLTEFILMGFQLQAELQLGLFFTFLTFYLITIAGNLGMIMLIQSDPRLQTPMYFFLSHLSFLDICYSSVIVPQLLEILGNNKMVITYEHCATQFFFFTFYASTECFLLAVMAYDRYVAVCNPLLYAMAMTPQTRLGLVAAAYSGAMVNTVVRTGCTFSISFCKSNQVDFLFCDLPPLMKLACSETKLQEQVIFLFAFLVIITSVSVILVSYLFIIWAILKIRTAGAKAKTFSTCASHMIAVALFFGTIIFMYLKGNMGKSLWEDKIVSVFYTVVIPMLNPMIYSLRNKEVKEALKKAFKRIKSSQESKT

SEQ ID NO: 1803 - protein, 315 aa, Mus musculus
MADNGTRLTEFILIGFQLQAELQLCLFFIFLAFYLITIVGNLGMIMLIQSDPRLQTPMYFFLSHLSFLDVCYSSVIVPQLLETLGSNKMVITYERCATQFFFFTLYASTECFLLAVMAYDRYVAVCNPLLYAMAMTPQTRLGLVAAAYSGAMVNTVVRTGCTFSISFCKSNQVDFFFCDLPPLLKLSCSETKLREQVIFLFAFLVITTSVSVILVSYLFIIWAILKIRTAGAKAKTFSTCASHMIAVALFFGTLIFMYLKGNMGKSLWQDKIVSVFYTVVIPMLNPMIYSLRNKEVKEALKKAFKRIKASQESKT

SEQ ID NO: 1804 - protein, 321 aa, Mus musculus
MTVKNITTMSGFLLMGFSDNRELQILYALLFLLTYLLGSAGNFIIITITTLDPQLQSPMYYFLKHLSILDLSSLSVTVPQYVDSSLAGSGYISYGQCMLQIFFFAAFAWGEVAILTVMSYDRYVAICLPLHYEVIMSPRKCTWAVTSVWLSSVIPGTLYIASIFSIRFCRAKIIHQLFCDVPQLLKLSCSNDHLVVIGMVSFMTAVAFACFVGIVISYVHIFSTVLRMPSAESRSKVFSTCLPHLFVVSLFLSTGSCAYLNTSSDSPTALEFLFSIFYTVLPPTLNPVIYSLRNETIKSVVRKLLLSSKFTVRIICPVATD

SEQ ID NO: 1805 - protein, 330 aa, Mus musculus
MISYSFFQEMSVNCSLWQENKLSVKHFAFAKFSEVPEECFLLFTLILLMFLVSLTGNALITLAICTSPALHTPMYFFLANLSLLEIGYTCSVIPKMLKNLVTEARGISREGCATQMFFFIFFGITECCLLAAMAFDRYMAICSPLHYATRMSREVCAHLAIVSWGMGCIVGLGQTNFIFSLNFCGPCEIDHFFCDLPPVLALACGDTSQNEAAIFVTVVLCISSPFLLIIYSYVRILFAVLVMPSPEGRHKALSTCSSHLLVVTLFYGSASITYLRPKSSHSPGIDKLLALFYTAVTSMLNPIIYSLRNKEVKAALRRTLSLKKPLAINR

SEQ ID NO: 1806 - protein, 309 aa, Mus musculus
MINSSVSSDFILVGFSDQPQLERRLFIVVLISYLLTLVGNTIIILISSIDSKLKTPMYFFLTHLSFVDICFTTSIVPQLLWNLKGPAKTITAVGCAVQLYVSLTLGSTECILLAVMAFDRYAAVCKPLHYVAVMNPQLCRALAGISWLSGIGNALIQGTITLWLPRCGHLWLHHFFCEVPSMIKLACVDIHANEVQLFVASLVLLLLPLALILTSYGHIAKAVIRIKSSQAWRRALGTCGSHLMVVSLFYGSITAIYIQPNSSYAHTHGKFISLFYTVMTPTLNPLIYTLRNKEVKGALGRLFNRASGV

SEQ ID NO: 1807 - protein, 321 aa, Mus musculus
MSINCSLWQENSLSVKRFAFSKFSEVPGECFLLFTLILLMFLVSLTGNELIAIAICTSPALHTPMYFFLANLSLLEIGYTCSVIPKMLQSLVSEAREISREGCATQMFFFTFFGITECCLLAAMAYDRCMAICSPLHYATRMSHGVCAHLAIVSWGMGCIVGLGQTNFIFSLNFCGPCEIDHFFCDLPPVLALACGDTSQNEAAIFVAAILCISSPFLLIIYSYVRILVAVLVMPSPEGRHKALSTCSSHLLVVTLFFGSGSITYLRPKSSHLPGMDKLLALFYTAVTSMLNPIIYSLRNKEVKTALRKTLSLKTSRAINR

SEQ ID NO: 1808 - protein, 309 aa, Mus musculus
MRMDNKSTVSEFILLGLPIRPENQVIYSSLILTMYLTTVLGNLLIILLIRLDPHLHTPMYFFLSHLALTDISFSSVTVPKMLVNMLTHSQSISYDGCVSQVYFFIVFGSIDSFLLTSMAYDRYVAFCHPLHYTIIMNLSLCVLLVGMFWVLSSANALVQTLLLARLSHFRNNTIPYYFCDLSTLLKLSSSDTTINDLIILVLGNAVITLPFICILVSYGYIGVTILKTPSIKGIRKALSTCGSHLCVVSLYYGSIIGLYCVPSSNNTSEKNAIVAVMYTVVTPMLNPFIYSLRNQDMKGALRNILSRTQ

SEQ ID NO: 1809 - protein, 312 aa, Mus musculus
MKRDNQSMVSEFILLGLPIRPEEQGMYYALFLTMYLTTVLGNLLIILLIRLDSHLHTPMYFFLSHLAFTDISFSSVTVPKMLRNMHIHDPSIPYAECIAQMYFFILFTDLDNFLLTSMAYDRYVAICHPLHYTTIMREELCILLVAISWILSCVSALSHTLLLARLSFCADNTISHFFCDLAALLKLSCSDISLNELVIFTVGTTVITLPLICILISYGHIVATILKVSSNKGICKALSTCGSHLSVVSLYYGTIIGVYFIPSSFTSTDKGIVASVMYTVVTPLLNPFIYSIRNRDMKEALKKLFNRASIST

SEQ ID NO: 1810 - protein, 313 aa, Mus musculus
MRLKNHSSVSEFLLLGFPIRPEQGGIFFSLFLAMYLITVLGNLLIILLIRLDSHLHTPMYFFLSHLAFTDISFSSVTVPKMLTKVQNQPIPITYEECVSQTYFFIFFADLDSFLITSMAYDRYMAICHPLHYITIMSQSRCAMLVAVSWVIASACALLHSLLLDQLSFCADHTVPHFFCDLGALLKLSCSDTSLNQLVIFTAGLAAIMLPFLCILISYGRIGFTILQVPTTKGICKALSTCGSHLSVVALYYGSIIGLYFLPPSNSKINNNIVASVMYTVVTPMLNPFIYSLRNKDMKGALKKLLSKKTEFSK

SEQ ID NO: 1811 - protein, 310 aa, Mus musculus
MEGVNQTRFVSEFILLGLSPRPEDQKPLFILFLTIYLVTLTGNLLIILAIRSDPHLHTPMYFFLSFLSLTDICFTTTIVPKMLVNFLSEKKTISYAGCLTQMYFLYALGNSDSCLLAVMAFDRYVAICNPFHYVTIMNHHRCALLVTFSCSFPHFHSLLHTLLLNLLTFCDSNVIHHFLCDLSPLLKLSCSSTFVNEIVIVTEGALVLVTPFLCIAFSYIRILVTVLKIPSAAGKRKAFSTCGSHFTVVTLFYGSIFYVYLQPVSTYTVKDHIATIVYTVLSSMLNPFIYSLRNKDLKQGLRKLISRRHI

SEQ ID NO: 1812 - protein, 315 aa, Mus musculus
MMTRNHSSVSEFLLLGLSEHWEQEPLLFGIFLVIYLVTVVGNTLIILAIVSDPHLHSPMYFFLANLSLTDMCLSSTTVPRMLVNIQTQRHSIPYAGCLSQIYFFLWFIGLDVFLLAVMAYDRLVAICYPLHYTLVMSPRCCILLVTTSLFLAHSYALTHIILLSQLSFCMDNIILHFFCELLPMLKLSCSNTYANQCVLLYWGGALTVLIPLLIIVSYVRIVATIVRVPSASGKWKTFSTCGSHLSAVCLFYVSAIGVYFIPYAADSASRDRIASVMYAVVTPMLNPFIYSLRNKDMTSALRRFLNKILLQPPQS

SEQ ID NO: 1813 - protein, 308 aa, Mus musculus
MDNSSWTSVSHFVLLGISTNPVEQIPLFLLFLLMYIINISGNFFIVTLIISTSHLHTPMYIFLSNLALADICFTSTTVPKMLQNIFSSTKVISYVGCLAQTYFFICFAAMENFLLAVMAYDRYIAICHPLRYSSILTGMLCAQMVALCHVLSHLHALLHTFLMGRLIFCADNRIPHFFCDLYPLMKISCSSTQLNTLMIHTEGVIVINGALAFIIASYAFIISAVLRIPSANGKWRSFSTCGSHLTVVAIFYGTLTWVYFRPLSSYSVVKGRIVTVMYTVVTPMLNPFIYSLRNGDVKEAFRKWVRRV

SEQ ID NO: 1814 - protein, 317 aa, Mus musculus
MATKNKTEVTEFVLLGLSSRPEIQPVIFGVVLIMYLMAVLGNTLLILVACSDPRLQTPMYFLLSQLSLIDISLTTITIPQMLVHTLSVNRSISYNRCMTQLFFFMAVGSMEVYLLGAMAYDRYVAICDPLRYSAIVSYSLCLQITLTSWMVVSLNSLLYSVLVTRLTFCGNKVTHFFCDITPLLKLSCTRPVLNEMLIFTEGVAVVGSPFFFIWGSYVRIGIAMAHMHSFAALKKALSTCSSHILVVLLLFGTLARMYLKPSSSYDLGQDRQVAIFYTLISPMLNPLIYSLRNQDVKGALWRLFRKLHTSDWLSDKE

SEQ ID NO: 1815 - protein, 308 aa, Mus musculus
MITENWTLAQDFLLLGFPGSQVLQFSLFLFFLVMYLLTIGGNMAILLLVSTSHQLQTPMYFFLSNLSFLEIWYTTAAVPKALAILVGKSQSISFLGCLFQMYLVFSLGCTEYFLLAAMAYDRYLAICFPLHYQTIMNSLLSAQLALSSWICGFLAISVPAALISTLSFCGTHAINHFFCDIAPWIALACTSTQGVETVAFVIAFVVILSSCLITLISYAYIIRTILRIPSTSGRRKAFSTCSSHLTVVLIWYGSTIFLHVRTSIKDDLQLTKAVHVLNTVVTPALNPFIYTLRNKEVREILGKKWKRK

SEQ ID NO: 1816 - protein, 308 aa, Mus musculus
MMNSTMVTEFLLEVFAETWELRILLTVLFLLMYLGSLFGNLIIIIVTTVDQTLNTPMYFFLRNLSILDMGFVSVTVPNACINSLTDHRNISVAGCAAQIFLVFFCSCVEIQFLTTMAQDRYVAICKPLMYPVIMTHQFCVQMTLASLLTSLILASVHTSKTFQLSFCHSNIVPQFFCDIPSLLRLSCSDTFNNKLLLLLSAIGLSGSCFTFIAVSYVRILSTVLKVPVKGERGKAFSTCVPHIIVVSVFLSSGAYVYLKPPAIPEIIEDMTLSVFYTIVPPFLNPIIYSLRNKQIKEAVKKVIFRFLS

SEQ ID NO: 1817 - protein, 319 aa, Mus musculus
MDVKNQTAVTEFIFLGFPGSSSLQLPLFMMFLTVYLLSLMGNTLIIFLILVDSTLQTPMYIFLGNLSFLEIWYTTATVPKLLATCVTKVVTIPVAGCITQYYFFFSLGATECILLAVMAYDRHVAVCRPLHYSLLMSVHICLRFSAASWVGGFLAPLLPTILISQLNFCGPQKINHFFCDSDPIFKLSCSDTFLVEALGYTCSSVVILSSFLLTMSSYGNIVVTIIRLSSREARKKTFSTCASHLTVVTIYYGTIIFAYVRPPAKYNFTIGKVVSVFYCVITPLVNPLIYTLRNKDVMKAFQKFLSQKKFLMGKNMHGL

SEQ ID NO: 1818 - protein, 309 aa, Mus musculus
MMNSTMVTEFLLEVFAETWELRVLLSVLFLLVYLGSLFGNLTIIIVTTVDQTLNTPMYFFLRNLSILDMCYVSITVPNACINSLTDHRNISVTGCAAQIFLFFFCACVEVQFLTIMAQDRYVAICKPLLYPMIMNHQFCVQMTLASLLTSLILSGMNTFKTFQLSFCHSNVVPQFFCELPALLRLTCSDTFNNKIILLLTAIGLSGTCFTFIAISYVRILSTVLKVPVKGERGKAFSTCVPHIIVAYLFFCSGAYAYLRPSAISEVVEDMTLSVFYTTVPPFLNPIIYSLRNKPNKEGCEESNIHIFHS

SEQ ID NO: 1819 - protein, 313 aa, Mus musculus
MPNITAFTGFLLTAFFDSQELQTLWGVFFLGIYLEALMSNLIIITLITLDLQLQTPMYFFLKNLSLLDVFFVSVPIPKFVVNSLIHNNSISVLACAFQVFLMTSFSSGEVFVLTAMSYDRYVAICFPLNYGAIMNNHTCVLMMGVSWATGMLFGAIYTAGTFSMPFCGSNVIPQFFCDVPSLLRISCSETLVAIYSCLGIGVCLGMSCFICVVISYFYIFSTVLKIPTTKGQSKAFATCIPHLTVFTVFLVTACFVYLKPFTNTLSISERLFSVLYTVLPPALNPLIYSLRNTDVKSALRRLQQNLCLRRLLI

SEQ ID NO: 1820 - protein, 319 aa, Mus musculus
MPNVTAVTGFILMGFSDIHELQILCGVLFLVLYLGILMSNLLIIILITVDLKLQTPMYFFLKNLSLLDVFLVSVTIPNFFVNSLMHKNSISILGCAFQVFFMALLGSGEVFVLTTMSYDRYVAICSPLHYEVIMNSVTCVVMMSVSWGTGLFFGVMYTAGTFSMTFCGSNVIPQIFCDVPSLLRISCSGSLMIIYISLGIGVCLGMSCFICVGISYIYIFSTVLKIPTTKGQSKAFGTCIPHLTVFSVFIATACFVYLKPPSNSASLTDRLFSVLYTVLPPALNPVIYSLRNNDVDSALKRLLQNLYSRDFLHVIHQNV

SEQ ID NO: 1821 - protein, 312 aa, Mus musculus
MRNGTAITEFILLGFPGIQGSEALLFIVIFLIYILTLSGNGLIIVIVWVEPRLQTPMYFFLCNLAFLEIWYTTTVIPKLLETFVVSKTVICTACCLLQAFFHFFLGTTEFLILGSMSFDRYLAICKPLRYPTIMTSNLCLQLALSSWLAGFTIVFCQTMLIVQLPFCGNNVINHFYCDVGPILKAACADTSILELLGLLATILVIPGSLLFTIISYIYILSTILRIPSATGRQKAFSTCASHLTVVSLLYGAVLFMYLRPTAHSSFKINKVVSVLNTILTPLLNPFIYTIRNKEVKGALRKAITCANRHHAK

SEQ ID NO: 1822 - protein, 307 aa, Mus musculus
MESGNLSMIIEFILTGFPTKPELQLPLFLLFLGIYLVTVLGNLGMIILIVLSSGLHTPMYFFLSSLSFIDLCHSTVITPKMLLNFLLEENIISYPECMTQLYFFSLFAIAECHMLAVMAYDRYVAICNPLLYKVVMSHHVCFWFTVGVYTLGILGSSVHTGLMLKLFFCKTNKINHYFCDLFPLLELSCSSIYINELLVLFLSALNILTPALTILMSYILIIVSILRIRSTEGRSKAFSTCSSHISAVALFYGSAAFTYLQPSSVSSMNQGKVSSVFYTTVVPMLNPLIYSLRNKDVKSSIKKILNR

SEQ ID NO: 1823 - protein, 307 aa, Mus musculus
MGTGNHSMVTEFILAGFSTKPELHLPLFLLFLGIYLLTVLGNLGMIILILLSSHLHTPMYFFLSSLSFIDLCHSTVITPKMLVNFVTEKNIISYPECMTQLYCFLVFAIAECHMLAVMAYDRYVAICNPLLYNVVMSHHLCFWLTVGVYSLGIVGSSVHTGFMLKLNFCKINVINHYFCDLFPLLELSCSSIYINELLVLFLSALNILTPALTILMSYIFIIVSILRIRSTEGRSKAFSTCSSHISAVAIFYGSAAFMYLQPSSVSSMDQGKVSSVFYTTVVPMLNPLIYSLRNKDVKSAVKKILNR

SEQ ID NO: 1824 - protein, 314 aa, Mus musculus
MFQGNLSGVTEFNLAGLTDKPGLQLPLFLLFLGIYVVTVVGNLSMITLILFSSQLHTPMYYFLSSLSFIDLCQSIVIIPKMLVNFVTVQNIISYPECMTQFCIFATFTIAECHMLAVMAYDRYVAICKPLLYNAVMSYQVCSWMIFGVYIMAFVGATTQTVFMLKVHFCKANVINHYFCDLSPLLELSCSDTFINEVLALCFSVFNIFIPTLTILSSYIFIIASILRIKSTEGRSKAFSTCSSHISAVAIFFGSLAFMYLQPSSINSMDQRKVSSVFYTIVVPMLNPLIYSLRNKDVKVALNKFLERIFSCEQN

SEQ ID NO: 1825 - protein, 311 aa, Mus musculus
MLKGNLSEVTEFILAGLTNKPELQLPLFLLFLAIYVVTVVGNLGMIILILLSSHLHTPMYYFLSSLSFIDLCQSTVIIPKMLVNFVTVKNIISYPECMTQLYFFVTFAIAECHMLAVMAYDRYVAICNPLLYNAVMSFQVCSSMIFGVYSIALIGATTHTVCMLRVNFCKANVINHYFCDLFPLLELPCSDTFINEVVVLCFSVFNIFIPTLTILTSYIFIIASILRIKSTEGRSKAFSTCSSHISAVAIFFGSLAFMYLQPSSVSSMDQGKVSSVFYTIVVPMLNPLIYSLRNKDVKVALNKFFERKFFL

SEQ ID NO: 1826 - protein, 314 aa, Mus musculus
MFQGNLSGVTEFNLAGLTDKPGLQVPLFLLFLGIYVVTVVGNLSMITLILFSSQLHTPMYYFLSSLSFIDLCQSNVIIPKMLVNFLAVKNIISYPECLTQLCFFATFGIAECQMLAVMAYDRYVAICKPLLYNAVMSFQVCSWMIFGVFSMALIGATTQTVCMLRVDFCNANVINHYFCDLSPLLKLSCSDTFINEVLALCFSVFNIFIPTLTILSSYIFIIASILQIKSTEGRSKAFSTCSSHISAVAIFFGSLAFMYLQPSSVSSMDQGKVSSVFYTIVVPMLNPLIYSLRNKDVKVALNKFLERIFSCKQN

SEQ ID NO: 1827 - protein, 312 aa, Mus musculus
MAYSNQSRVTEFIIAGLTNKPELQLPLFLLFLGIYLFTVLGNLGMIILILLSSHLHTPMYFFLSSLSFIDLCYSTIITPKMLVNFVTTKNVISYQECMTQLYFFIAFVISECHMLAAMAYDRYVAICNPLLYNVTMSYQVCSWMVGGVYGMGFIGAAIHTFCMLRVVFCKDNIINHYFCDLFPLMELACSSTYVNEVVLLSLSAFNIFIPTLTILGSYIFIIISILRIKSTEGRFKAFSTCSSHFSAVSVFFGSLAFMYLQPFSVSSKDKGKVSSVFYTTIVPMLNPMIYSLRNRDVKLALNKLFQKKKFHV

SEQ ID NO: 1828 - protein, 314 aa, Mus musculus
MNPANHSQVATFFLLGLSQVWELRFLFFTVFSAVYLLTVTGNLLIVAIVTSDPRLHTTMYFLLGNLSFLDFCYSSITAPRMLVDLLSHSPTISFGACLTQLFFFHFIGGIKIFLLTVMAYDRYIAISQPLRYTLIMNQTVCGIFMAASWVGGFIHSIVQVGLTIHLPFCGPDKLDNFYCDVPQLIKLACTDTFVLELLMVSNNGLVTLMCFLVLLGSYTALLVMLRSHSKEGRSKALSTCASHITVVTIIFVPCIYIYARPFRTFPMDKAVSVLYTMVTPMLNPAIYTLRNKEVIVAMKKLWRRKKDFLGSSDH

SEQ ID NO: 1829 - protein, 312 aa, Mus musculus
MGNYSAVTEFFLVGLSQYPELQLFLFVLCLIMYLIILLGNSLLIIISILDSRLHTPMYFFLGNLSFLDICYTSSSIPQMLIMFMSARKSISFLGCALQMVISLGLGSTECVLLAVMAYDRYAAICNPLRYPIIMNKVLYVHMAVWSWVIGCLNSLVQTVLTMVLPFCGNNVIDHLTCEILALLKLVCSDITMNVLIMTVASIVLLMIPLMLIFVSYIFILSSILRINSAEGRKKAFSTCSAHLTVVILFYGSALFMYMKPKSKYTKASDEIIGLSYGVVTPMLNPIIYSLRNKEVKEAVKKILSKRLYLRKI

SEQ ID NO: 1830 - protein, 313 aa, Mus musculus
MEPQNHTSASEFILLGLSEKPDHDPVLFSLFLCMYMITVVGNLLIILAISFDSHLHTPMYFFLANLSLVDFCLATNTVPKMLVNIQTRNKSISYPCCLTQMYFFHFFGIMDSVLIAVMAYDRFVAICHPLHYSTIMSPRLCGLLVGVPWVYSCFISLTHILLMARLVFCGKNELPHYFCDLTPLLRLSCTDTTVNKIFVLIVAGMVIATPFVCILASYARIIVAIMKVPSAGGRKKAFSTCSSHLSVVALFYGTTIGVYLCPSSVRTAVKEKASAVMYTAVTPMLNPFIYSLRNRDLKGALKKIINRKISTSS

SEQ ID NO: 1831 - protein, 312 aa, Mus musculus
MESKNQTDVSEFFLMGITDDIALKPLIFSMFTSMYLITILGNLLIILTVCSDSHLQTPMYIFLSNLSFNDICLSTTIIPKTLVNIHAQDQSITYTSCLTQICFTLLFCSFESCLLSVMAYDRYVAICHPLNYTTIMNPQTCGLLILLSLIISLVNSGLLGLMVLRLSFCTNLEIPLFFCELAQVIKLACSDTLVNYILIYLATIILNGIPISGIIFSYTQIASSVLRMSSVKGKYKAISTCGSHLSVVSLFYGTALGVYISSSFTTSVTNTAFAYVMCTLVPQMLNPFIYSLRNRDMEVALRKHINRAMCLL

SEQ ID NO: 1832 - protein, 314 aa, Mus musculus
MGRENQSFVDEFVLLGLSQDAQTQILLFVLFFIVYILTVLGNLLIIVLILMDSRLHTPMYFFLRNLSFADLCFSNSIVPQVLSHFLVKRKTISFWGCVTQVIVSLQIGCTECALLAVMSYDRYVAVCKPLHYSTIMTQQLCLQLALGSWASGLLVCLVDIAVAFHLPYRGQNIVSHYFCELPALLKVASADTYSTEMAIFAMGVVILLAPVSLILISYWNIISTVIQMQSGEGRLKVFSTCGSHLIVVVLFYGSAIFNYMQPNTKTRKKQDKIMSVFYTVVTPMLNPIIYSLRNKDVKSAFRKLAARVVFFRKQ

SEQ ID NO: 1833 - protein, 321 aa, Mus musculus
MKSCKRMTWGNWTTVREFILMSFSSLSYEVQALLFLLFLIIYLVTLMGNVLIILVTTADSALQSPMYFFLRNLSFLEIGFNLVIVPKMLSTLILQDKTISFLGCATQMYFFFFFGAAECCLLATMAYDRYMAICDPLHYPIIMSRRSCAQLAAASWFSGFPVATVQTTWIFSFPFCGPNMVNHFFCDSPPVIALVCADTSLFELEALTATVLFILFPFLLILGSYVRILSTIFRMPSAEGKRKAFSTCSSHLLVVSLFYSTAILTYFRPRSNTSPENKKMLSLSYTVITPMLNPIIYSLRNNEVKAALRRIIHRTLGPQKL

SEQ ID NO: 1834 - protein, 311 aa, Mus musculus
MELWNSTVGSGFILVGILDGSGSPELLCAAITALYFLALTSNGLLLLVITMDARLHVPMYLLLGQLSLMDLLLTSVITPKAVVDFLLKDNTISFGGCALQMFLELALGSAEDLLLAFMAYDRYVAICQPLNYTILMSHKVCWLMIATSWILASLSALGYSIYTMQYSFCKNRQINHLFCEIPPLLKLACADTSTYELMVYLMGVIVLILPLTAILASYSLILFTVLNMPSNEGRKKALVICSSHLTVVGMWYGGASFMYVLPSPFHSPKQDNISSVFYTIVTPALNPLIYSLRNKEVTGALKRVLGKRLSA

SEQ ID NO: 1835 - protein, 310 aa, Mus musculus
MGKLNHTYLTEFILLGLSSDHQTQILLFVVFLIIYLITVFGNLLIILLIHVDSRLHTPMYFFLKILSFNDLCFSTTIVPKMLVHFLGVRKTISFAGCSVQMFSFLIMGCTESSLLAVMSYDRYIAVCKPLHYSTIMTHKVCVLLVVGSWTSGIFVSVVDTSFTLCLTYRGPNIINHYFCEPPALLKLASEETYTAEMVIFAMGIIILLGPVSLILFSYWNIISTVVQIQSGEGRLKVFSTCSSHFIVVIFFYGSTIFTYMQPNSKKMNEKDKVISVFYSIVTSMMNPFIYSLRNKDVKGALKKVLKREIR

SEQ ID NO: 1836 - protein, 316 aa, Mus musculus
MELWNSTLGSGFILVGILDDSGSPEILCATFTALYMLAMISNGILLLVITMDARLHVPMYLLLWQLSLMDLLLTSVITPKAVIDFLLKDNTISFGGCALQMFLELTLGGAEDLLLAFMAYGRYVAICHPLNYMTFMKPRICWLGVFISWTLASLSAVGYTIYTMQYPFCKSRKIRHLFCEIPPLLKLACADTSKYELMVYVMGVIFLLLPLAAILSSYTLILLTVLHMPSHEGRKKALVTCSSHLTVVGMWYGGASFMYVLPSSFHTPKQDNIFSVFYTIVTPALNPLIYSLRNKEVTGALRRVLGGRLLPEHSTF

SEQ ID NO: 1837 - protein, 317 aa, Mus musculus
MEFRNSTLGSGFILVGILNGSDSPELLCATITFLYTLALTSNGLLLLVITVDTRLHVPMYLLLGQLSLIDLLLTSVITPKAVMDFLLRDNTISFGGCALQMFIELVLGGAEDLLLAFMAYDRYVAICHPLNYMILMSPRVCWLMVTASWILSIQMALGFTINTMHYSFCKSRHIRHLFCEIPPLLDLACADTSSYKLVVYLVGVFMLILPLTAIFFSYARILFTVLHMPSNESRKKALVTCSSHMTVVGMYYGALTVMYFLPSSYHNPKQDNILSVFYTIVTPALNPLIHSLRNKEVTGALRKVLGNTCCHHPIHLR

SEQ ID NO: 1838 - protein, 315 aa, Mus musculus
MEVFNSTLGSGFILVGILNDSGFPEMLCAIIIALYFLALTSNGLLLLVITMDARLHMPMYLLLWQLSLMDLLQPSVIIPKAVLDFLLKDNTISFGGCAFQMFLALTLGSAEDLLLSFMAYDRYVAICHPLNYTILMSQKVCYLMIATSWILASLSALGYSMYTMQYPFCKSRQIRHLFCEIPPLLKLACGDTSTYELMVYLMGVTLLFPALAAILTSYSLILLTVLHMPSNEGRKKALVTCSSHLTVVGMWYGGAIFMYILPSSFHSPKQDNISSVFYMIVTPALNPLIYSLRNNEVIEALKRVLGKKFSVHSTF

SEQ ID NO: 1839 - protein, 318 aa, Mus musculus
MGGGNQTYIVEFILLGLSENPKVQILLFCIFLIIYFLSVFGNLVIIILIQIDSRLHTPMYFFLKNLSFADLCFSTSIVPQMLVHFLSKRKTISFIGCSIQIVVFLLAGCTECALLAVMSYDRYVAVCKPLHYSTIMTQRVCCQLAIVSWISGAFACSVDSAFTLCIPYQGQNVINHYFCEPPALLKLASADTYNAEMALFLVGVIILLAPVSLILVSYGNIISTVIRMQSREGRLKVFSTCGSHLTVVVLYYGSGIFAYMRPNSKTMSEKDKVVSVFYSVMTSMLNPIIYSLRNKDVKGALGKLVGRLSTVKGGAAEM

SEQ ID NO: 1840 - protein, 319 aa, Mus musculus
MEFRNSTMGNGFILVGILDDSGAPDLLCATITALYMLALTSNGVLLLVITMDARLRVPMYLLLGQLSLMDLLLTSVITPKAVIDFLLKDNTISFGGCALQMFLELVLGSAEDLLLAFMAYDRYVAICHPLNYMIFMRPSVCWFIVGTIWILASVIALGFTIYTMNYPFCKSRQIRHLFCEIPPLLKLACEDTSTYELMVYLAGVSVLILPLAVILASYVRILFTVLHMPSNEGRKKALVTCSSHLIVVGMWYGGSSLMYVLPSQFHSPKQDNILSIFYTIVTPALNPLIYSLRNKEVTGALRRIFGKWLGPAHFLGSSF

SEQ ID NO: 1841 - protein, 316 aa, Mus musculus
MAGTNHTEVIEYVLLGLQDHHGLEIALFVLCLGIYCMTLLGNSFLVGLIVLDTHLHSPMYFFISNLSLIDICGTSSFTPMMLLNFLDVQRTISFPSCALQMYLTLALGTTECLLLAVMAYDRYVAICQPLHYPELMNGPLCIQMAGISWGTGFANSLLHSILVWHLPFCGHYIINHFFCEILAVLKLACGDISLNALILTVATAVLTMTPLLLICLSYIFILAAILRVPSAAGRSKAFSTCSAHLTVVVIFYGTITFMYLKPKDQDPSVGKIITLLYAIVAPSLNAFIYSLRNSEVKAAVTALLWGGLLTRKMSHF

SEQ ID NO: 1842 - protein, 321 aa, Mus musculus
MNTWNYTKESDFILMGLTDSKEIQLVLTVLFVLIYLVTVLGNAGMMLIIRLDAQLHTPMYFFLSHLSFLDLSYSTVITPKTLQNLLTSTKVISFIGCFTQMYAFVLLAAAECFLLASMAYDRYVAICNPLQYPVIMSTRFCSTLLTGSYMIGTMDSTVNIFCMNTLYFCRTKVIHHFFCDTSPILALSCSDTRNIQIIIFIFAGSTLVVSLITISASYVSILSTILKINSTSGKHKAFSTCASHLLGVTVFYGTLIFTYLKPSNSYYSGKEQVASVFYTIVIPMLNPLIYSLRNKEVKSAIHRVIKKQKGSRLKFRVALSD

SEQ ID NO: 1843 - protein, 312 aa, Mus musculus
MQYTNYTKPTEFIFIGFTDYQPIRLMLFLVFFIVYTLTLVGNIGLIILVNIDLSLQTPMYHFLSNLSFLDISYSTAIAPKMLVDFLASKKSISFCGCAIQMFFFACFADAECLILAAMAYDRYAAICNPLLYSTLVSRRVCFSLVVLAYFSGSVTSLVHVSLAFMLPYCRSNIVNHFFCDIPPLLALSCADTHINELLLFALCGTIQTSTFMVILISYSCILITVLSIKSTGGRSKTFSTCASHLIAVTLFYGTLLFMYLRPTTSYSPDTDKVVALFYTVVFPMLNPIIYSFRNKDVKNALKKLFDRLGIFR

SEQ ID NO: 1844 - protein, 310 aa, Mus musculus
MENITEVTEFILMGFTDNADLEILSFFLFLAIYLFTLMGNLGLITLVIGDSRLHNPMYYFLSVLSSVDACYSTVITPQMVVDFVSEKKVISFIGCATQMFLAVTFGTTECFLLAAMAYDRYVAIHNPLMYVVSMSPRVYVPLIIASYAGGILHAVIHTVATFRLSFCGSNKISHIFCDIPPLLAISCSDTHFNQLLLFYCAGFIEVVTILIVLLSYGFILSVILKTRSTEGKRKVFSTCGSHLMAVSTFHGTVLFMYVRPSDSYALEHDMMVSIFYSIVIPMLNPLIYSLRNKDVKEAIKKVFGKRILCG

SEQ ID NO: 1845 - protein, 310 aa, Mus musculus
MENVTVSLFILRGLTDNAELQISLFFLFLMIYLFTLMGNIGLISVVIGDSQLHNPMYYFLGVLSFIDTCFSTIITPKMLIDFMSKRKVISFLGCVAQMFLAVSCGTTECFLLAAMAYDRYVAIYNPLLYAVNMSPRVYMSLIIASNVGGILHASIHTAATASLSFCDSNEIKHFFCDIPPLLAISCSDTKMNELLLFIFVSSIEVVTILIIIVSYSFILFAILKMHSAEGRPKVFSTCGSHLTGVSIYYGTIFFMYMRPSSSYTLEHDMIVSTFYAVVIPMLNPIIYSLRNKDVKKAMKRLLAKVFMSIR

SEQ ID NO: 1846 - protein, 313 aa, Mus musculus
MEKQNLTVLSEFILKGITDRPELQAPLFGLLFIIYLISAVGNLGIIIITNVDSRLHTPMYFFLKHLAFTDLGYSTAIGPKMLVNFVAEHNSVSYYLCATQLACFLLFITCELFILSSMSYDRYVAICNPLLYTVIMSQRICWVLVAVPYIYSVFVSLIVTIRLFTLSFCGYNIINHFFCDCIPLISLLCSNTHEVEVIIRFFATFDLISSLLVVLVSYLFILITILRMKSAAGRRKAFSTCGSHLTVVIVFYGTLIFMYVQPKSSQTFETDKVSSIFYTLVIPMLNPLIYTLRNKDVKDAIERTWEKIVTSFS

SEQ ID NO: 1847 - protein, 315 aa, Mus musculus
MPSLNNTAVMDFILVGLTDSPVLGRILFVVFLVIYLITLTGNLCMIVLIRTNSHLQTPMYFFLGHLSFVDICYSSNVTPNMLHGFISDQKIISYAGCFTQCLLFIALVITEFYLLASMALDRYVAICSPLHYSTRMSKNVCFSLVSFSYVFGFLNGLSQTLLTFHLSFCGSHEINHFYCADPPLIMLACSDTHVKKMAMFVVAGFTLISSLSIILFSYLYIFAAIMRIRSAEGRQKAFSTCGSHLTTVTIFYGTLFCMYLKPPSERSIEESKVIAVFYTFLSPFLNPLIYSLRNKDVINAMKQVIKGNFCQKILV

SEQ ID NO: 1848 - protein, 318 aa, Mus musculus
MLAPKKMVRGNYSMVTEFILLGLTDRPELQPLLFVLFLVIYLITVGGNLGMMVLIRIDSRLHTPMYYFLASLSCLDLCYSTNVTPKMLVNFLSEKKTISYAACLVQCYFFIAMVITEYYMLAVMAYDRYMAICNPLLYSSKMSKGVCVRLIAGPYIYGFLSGLMETMWTYRLTFCGSNIINHFYCADPPLIRLSCSDTFIKETSMFVVAGFNLSNSLFIILISYLFILIAILRMRSAEGRRKAFSTCGSHLVAVTVFYGTLFCMYVRPPTDKSVEQSKIIAVFYTFVSPMLNPIIYSLRNKDVKHAFWKLVRRNVLSK

SEQ ID NO: 1849 - protein, 311 aa, Mus musculus
MTFLNHTAMMDFILMGLTDSPVLGRILFVVFLVIFVITLAGNLFMIVLIRTNSHLQTPMYFFLGHLSFVDICYSSNVTPNMLHGFISDQKTISYAGCFTQCLLFIALVITEFYLLASMALDRYVAICSPLHYSTRMSKNVCVSLVAFPYVFGFLNGLSQTLLTFHLSFCGSHEINHFYCADPPLIMLACSDTHVKKMAMFVVAGFTLSSSLAIILLSYLFIFIAILRIRSAKGRQKAFSTCGSHMTTVTIFYGTLFCMYLRPPSEKSVEESKVIAVFYTFLSPMLNPLIYSLRNKDVINAMKQVVKGKLLH

SEQ ID NO: 1850 - protein, 311 aa, Mus musculus
MDHMKINFTVTEFVFLGLSSDPKVQLVLFFVFLFFYMLSVVGNIIIITIIQIEPRLKTPMYFFLANLSFLDICYTSTNVPQMLSNMVGSKKTIPFVSCATQMYFSLSFGMIECVLLGVMAYDRYVAICHPLHYTVIMDQNTCVQLAAISWSSSFLSSMVINVLTLSLPYCGPNVLNHFFCEVPSVLRLACTDTSLTELVVFVFSIIIVFIPFLLIIVSYARILLSVLRMRSASGRHKALSTCASHLTVVTLFYGTAIFMYMRPQSKSSRAGGKVIAVFYTVVTPMLNPLIYSLRNQDVKGSLRRAITKQKT

SEQ ID NO: 1851 - protein, 319 aa, Mus musculus
MDEDNNSTVHQFILVGLTDDPELEVILFAVFLVIYLTTVLGNLGLIMLIQVSPQLHTPMYFFLCHLAFVDFCYTSSVTPNTIINFLRDIKSITFYACATQVCCFITFAVCEMYLLSVMAYDRYVAIWNPLLYVVLMPKKLCLRVIASTYIYGFTVGLAQAVATFRLSFCGSNVINHFYCDDVPLVALACSDTHVKELMLLIIAGFNTLCSLVIVVISYICILFAILRIHSAEGRRKAFSTCASHLTSITIFYGTIIFMYLQPKSSHSLNTDKFVSVFYVVVIPMLNPLIYSLRNKEVKNALKRFTEKLSLTIHDSRKSE

SEQ ID NO: 1852 - protein, 307 aa, Mus musculus
MLKKNFTTVTEFIFLGLTDRAELQPVLFVVFLLIYLITVTGNVSMIFLIRSDSKLHTPMYFFLSHLSFVDLCYATTVAPQMLVNFLSKRKNISFIGCIIQFHFFIALVITDYYMLAVMAYDCYVAICKPLLYTSKMSRRVCLSLVATQYIYGFVNGLIQTILMLRLTFCGPNEINHFYCADPPLMVLACSDTYVKKTAMFVVAGSNLTCSLTIILISYIFIFTAILRIRSAEGRQKAFSTCGSHLTAVTIFYGTLFCMHLRPPSETSVEQGKIVAVFYIFVSPMLNPFIYSLRNKDVKNAIRKVIQK

SEQ ID NO: 1853 - protein, 319 aa, Mus musculus
MAQINCTQVTEFILVGLTDRKELKMPLFVVFLFIYLFTAIGNLGLILVIRTDARLNTPMYFFLSNLAFVDFCYSSVITPKMLGNFLYSKNAISFNACAAQLGCFLTFMVSECLLLASMAYDRYAAICNPLLYMVTMSPGICIQLVVVPYSYSFLMALIHTLLTFRLSYCHSNIINHFYCDDMPLLRLTCSDTHYKQLSILACAGITFISSVLIVSVSYMFIISAILRMRSAEGRRKAFSTCSSHMMAVSIFYGTLIFMYLQPSSDHSLDTDKMASVFYTVIIPMLNPLIYSLRNKDVKDALKRVMDNRNQTSIFRELRK

SEQ ID NO: 1854 - protein, 316 aa, Mus musculus
MEKSNHSARIQVTEFILLGLTNNPGLKAPLFVIFLIIYLVTLMGNLGMVILTHVDSKLHTPMYFFLRHLSITDLGYSTVIGPKMMVNFVMQQNIISYTGCAVQLTFFEIFIITELFILSAMAYDRYVAICKPLLYVIIMAGKVRWGLVLVPYLYSLFVSLLLTVKLFTLSFCGSNTISYFYCDCVPLISLLCSDTHELELIILIFSGCNLLSSLLIVLVSYMFIFVAILRMNSKEGRSKAFSTCSSHLTVVVVFYGTLLFIYLQPKSSHTFEIDKMASVFYTLVIPMLNPLIYSLRNKEVKEALKRTLTQGLRIHT

SEQ ID NO: 1855 - protein, 317 aa, Mus musculus
MVRTMKGIQDKNATEVTEFILLGLSENPDLQGVLFALFLIIYTMTLVGNLGMMALIKIDRSLHTPMYFFLSSLSFVDASSSSTVTPKMLLNLVAEDKSISFNGCATQFFFFGSFLGTECFLLAMMAYDRYAAIWNPLLYPVLMSGSICFMLVSTSFLAGFGNAAIHTGMTFRLSFCGSNKINHFYCDTPPLLKLSCSDIHINGIVIMAFSSFTVLICVLIVLISYLCILIAILKMPSAEGRHKAFSTCASHLMAVTIFFGSILFMYLRPTTSYSMEQDKIVSVFYTVVIPMLNPLIYSLKNRDVKEAVKKILQKHIL

SEQ ID NO: 1856 - protein, 317 aa, Mus musculus
MVRSGKGIQNKNATEVTEFILLGLSDNPDLQGVLFALFLIIYTMTLVGNLGMMALIKIDRSLHTPMYFFLSSLSFVDASYSSSVTPKMLVNLMAEDKSISFNGCATQFFFFGSFLGTECFLLAMMAYDRYAAIWNPLLYPVLMSGRICFMLVSTSFLAGFGNAAIHTGMTFRLSFCGSNKINHFYCDTPPLLKLSCSDTHINGIVIMAFSSFNVISCVLIVLISYLCILIAILKMPSAEGRHKAFSTCASHLMAVTIFFGTILFMYLRPTSSYSMEQDKVVSVFYTVVIPMLNPLIYSLKNKDVKKAVKKILHNYVV

SEQ ID NO: 1857 - protein, 310 aa, Mus musculus
MLNFTDVTEFILLGLTSRKELQVLFFVIFLMVYIVTMVGNIGMMILIKISPQLSSPMYFFLSHLSFVDVWFSSNVTPKMLENLLSKTKTISYAGCLVQCFFFIALVHVEIFILAVMAFDRYMAIGKPLLYGSKMSRVVCIRLISFPYIYGFLTSLAATLWTYGLYFCGKTEINHFYCADPPLIKMACAGTFVKEYTMIILAGINFTYSLSVVIISYLFILIAILRMRSAEGRRKAFSTCGSHLTAVVIFYGTLIFMYLRRPTEESVEKGKMVAVFYTTVIPMLNPMIYSLRNKDVKEAMDKVISRKGLTK

SEQ ID NO: 1858 - protein, 310 aa, Mus musculus
MLNFTDVTEFVLLGLTRRKELQVLFFVIFLMVYIVTMVGNIGMMILIKISPQLSSPMYFFLSHLSFIDVWFSSNVTPKMLENLLSKTKTISYAGCLVQCFFFIALVHVEIFILSVMAFDRYMAIGKPLLYGSKMSRVVCIRLISFPYIYGFLTSLAATLWTYGLYFCGKTEINHFYCADPPLIKMACAGTFVKEYTMLFLAGINFTYSLIVVIISYLFILIAILRMRSAEGRRKAFSTCGSHLTAVGIFYGTLIFMYLRRPTEESVEQGKMVAVFYTTVIPMLNPMIYSLRNKDVKEAMDKVIAKKFLTK

SEQ ID NO: 1859 - protein, 314 aa, Mus musculus
MAKSNHSVVTEFILLGLTEDPELQIILFVILLIIYLFSVMSNLGLVVLIQISPQLQSPMYFFLSHLAFVDFCYTSCVTPNALVNFLREIKSISFYGCAAQVCFFTTFSVCEVFLLSVMAYDRYVAICNPLLYVILMPRRLCIQIAITTYIYAFVTALIQTVTTFILSFCDSNLVNHFFCEDIPLMALACSNTQVKELLLLSMAGFNVCCSLLIVLISYLFIVSAILKKHSGEGRQKVFSTCASHLSSIAIYYGTIIFMYLQPESSHSLNTDKFAAVFYVVVIPMLNPLIYSLRNTEVKNALKKSIDNIPINISK

SEQ ID NO: 1860 - protein, 314 aa, Mus musculus
MMDNLSSATEFCLLGFPGSQELHYILFAIFFFFYSVTLLGNMVIIIIVCVDKRLQSPMYFFLGNLSLLEILVTTTIVPLMLWGLLLPGKQTISLNGCIAQLFLYLALGTTEFAVLGAMAVDRYVAVCNPLRYSVIMNSRTCIWVVMVSWMFGFLSEIWPVYATFQFTFCKSNLLDHFYCDRGQLLKLSCNETFLTEFILFIMAIFIIVGSLIPTIVSYTYIISTILKIPSASGRKKAFSTCASHFTFVVIGYGTCLFLYVKPKQTQAAEYNRVASLLVSVVTPFLNPFIFTLRNDKVKEALRDGVKRCCLLLRD

SEQ ID NO: 1861 - protein, 317 aa, Mus musculus
MSLMENNTKVTEFLLLGLTNDPELQLPLFLIFLLIYTITLVGNLGLILLIVLDSCLHTPMYIFLGNLSLVDFCYSSAVTPSVMTELLIGKKVISYNDCAAQTFFFVAFCTVENYLLASMAYDRYAAVCKPLHYASTMTTRVCIYLSIGSYVCGFLNASINTGNTFSLFFCRYNMIHHFFCDIPAVMVLSCSDRYFSELLLVYVVSFSIFFALLVICISYIFIFITIAKMHSSAGYGKAAPTCASHFTAVSIFYGTVIFMYLLPSSSHSMDTDQIASVFYTMIIPMLNPLVYSLRNKEVKSAFTKIFQVAKQSVMLYF

SEQ ID NO: 1862 - protein, 318 aa, Mus musculus
MMHRNQTVVTEFFFTGLTSSFHLQIVLFLTFLCVYLATLLGNLGMIILIHLDTRLHIPMYFFLSHLSFVDACSSSVISPKMLSDMFVDKKVISFLGCAIQLCLFSQFVVTECFLLASMAYDRYVAICKPLLYTLIMSQRVCVQLVIGPYSIGFISTMVHIISAFVLPYCGPNLINHFFCDLLPVLSLACANTQMNKRLLFIVAGILGVFSGIIILVSYVYIAITILKISSADGRRKAFSTCSSHLTAVSILYGTLFFIYVRPSSSFSLDINKVVSLFYTTVIPMLNPFIYSLRNKEVKDALIRTFEKQFCYSLQDKIL

SEQ ID NO: 1863 - protein, 318 aa, Mus musculus
MMHRNQTVVTEFFFTGLTSSFHLQIVLFLTFLCVYLATLLGNLGMIILIHQDTRLHIPMYFFLSHLSFVDACSSSVISPKMLSDIFVDKKVISFLGCAIQFCLFSQFVVTECFLLASMAYDRYVAICKPLLYTLIMSQRVCVQLVIGPYSIGLISTVVHTTSAFILPYCGPNLINHFFCDLLPVLSLACADTQMNKHLLFIMAGILGVFSGIIILVSYVYITITILKINSADGRRKAFSTCSSHLTAVSILYGTLFFIYVRPSSSFSLDINKVVSLFYTAVIPMLNPFIYSLRNKEVKDALIRTFEKKFCYSLQDKIL

SEQ ID NO: 1864 - protein, 314 aa, Mus musculus
MADENYTRITEFIFIGLRYHPNLQVFLFLLFLLFYLVTMTGNLGMIILIRVDSRLHTPMYFFLSHLSFVDICFSSVVAPKMLTDFFADKKAISFLGCVLQQWFFGFFVAIECLLLASMAYDRYVAICNPLLYSVAMSQRLCIQLVIGPYAVGFFNTMTHTTAAFRLPFCGSNIINHFFCDMSPILSLICADIRINKLLVFIVAGAVLIVSSTTIIVSYFHILIAILRIRSAEGRRKAFSTCSSHVTAVSILYGTLFFIYVRPSAISSLDLNKVVSVFYTAVIPMLNPLIYSLRNKEVKSAMGRTVAKAKVFLKN

SEQ ID NO: 1865 - protein, 312 aa, Mus musculus
MDVDNRTILTEFILLGFSADPHWQLILFGIFLTIYLMTLLGNMTLIILIRIDSRLHTPMYFFIGGLSFLDFWYNSVYIPKILVNCVSEDKRISLAGCGAQFFFSCVAAYTECYLLAAMAYDRHAAICSPLLYSSIMSTSLCAGLVGASYVGGFLNAIAHTANTFRLRFCGKNIIDHFFCDVLPLVKMSCTDTRVYVKILSSMVGFTVLSSILAILISYLNILLAILRIRSASGRRKAFSTCASHLVSVTLFYGSLLFMYSRPSSNYSLERDKVAAMFYIIINPLLNPFIYSLRNKDVKEAFKKLMQTIKQQT

SEQ ID NO: 1866 - protein, 320 aa, Mus musculus
MTRFSSVDMELDNRTILTEFILVGFSADPHWQLTLFGIFLTIYLLTLSGNMLLVVLIRINSRLHTPMYFFISNLSFLDFWYTSVYTPKILATCISEDKRISLAGCGAQLFFSCVVAYTECYLLAAMAYDRHSAICSPLIYSSIMSSSLCTGLVAGCYIGGVLNAIAHTANTFRLTFCGKNIIDHFFCDAPPLVKMSCTDTRVYEKVLLGVVGFTVLSSILAILISYFNILLAILRIRSASGRRKAFSTCASHLVSVMLFYGSLLFMYSRPSSTYSLEKDKVAALFYTVVNPLLNPLIYSLRNKDVKDAFRKATQTIRPHT

SEQ ID NO: 1867 - protein, 305 aa, Mus musculus
MEQYNDTVTEFILVGFTTNPVMQLVLFVIFLAVYALTVLGNSTLIVLICNDSRLHTPMYFFIGNLSFLDLGLSTVYTPKILVTCISEDKSISFSGCVAQFFFSAGLGYTECYLLAAMAYDRYVAISKPLLYSQAMSLKLCAFLVGVSYLGGLINSFIITKDTFALTFCNDNVIDDFFCDIPPLVKLACGKKKSFQSVLFFLLTSNVIIPIVFILATYLFIIATILRIRSTQGRLKAFSTCSSHLISVTLYYGSILYIYAWPRSSYSLDRDKIVSTFYTVVFPMLNPLIYSLRNKDVKEALSKLFK

SEQ ID NO: 1868 - protein, 311 aa, Mus musculus
MERGNHTVTGFILLGFSTDPVMQKILFVMFLGVYSLTLLGNTTLIILICNDSRLHTPMYFFIGNLSFLDLWYSSVYTPKILVTCISEDKSISFAGCLSQFFFSAGLAYSECYLLAAMAYDRYTAISNPLLYAQAMSRRLCVCLVVYSYTGGFVNAIILTSNTFTLDFCGDNVIDDFFCDVPPLVKLACDVRESYQSVLYFLLASNVISPTLLILTSYLFIIAAILRIRSTQGRLKAFSTCSSHLISVTLYYGSILYIYSRPSSSYSLERDKMVSTFYTVLFPMLNPMIYSLRNKDVKEALRKLFKLAPSEV

SEQ ID NO: 1869 - protein, 313 aa, Mus musculus
MEISNQSGISEFFLTGLTYSPAIESFIFSLFLSIYFVTIFGNILIILAVRLDYHLHTPMYFFIANLSFTDICISTTIIPKMLLNIETQNQSITYTGCLSQVCFVLIFGGLESCLLAVMAYDRYLAIVHPLRYTVIMNPCLCVLLVLLSLFISTINALLHSLMLLKLSFCKDQNILHFFCELVQVIKHACSDTFINTLLIYTVTSVFAGVPLAGIIFSYIQIVSSILKISSVQGRNKAFSTCGSHLSVVSLFYGTAFGVYMSSAVSDSSVKNIVFSMMYTVVPQMLNPFIYSLRNREMKQAMRHLLFPVVLSSP

SEQ ID NO: 1870 - protein, 315 aa, Mus musculus
MSNMEVENKSVVLDIFLHGLTNDPELQPFIFVLFLSIYLITVSGNLLIMLAIKCDFHLHNPMYFFLCHLSFNDMYLISITVPKMLMNIQTKDQRITFAGCLSQACFVVVCTIFECFLLGVMAYDRYIAICYPLRYTVLMNPSFCVILVLFSLFFSIVNGLLHSLMVLYLSFCTDLEILHFFCEIAQILKLACSDSLINNILIFVTASIFAGLPLFAIIFSYTHIVSTVLKMPSSEGKYKAFSTCGSHLSVVSLFYGTGFGVYITSKVIDSPKKIAVASVMYSVVPPMLNPFVYCLRNRDMKEALKKVIGRTASLL

SEQ ID NO: 1871 - protein, 312 aa, Mus musculus
MEVKNKSVVLDIFLHGLTDDIELQPFIFGFFLCMYLITIFGNLLIMLAIICDSHLHKPMYFFLCHLAFNDMYLISITVPKLLVNVQTQDQRITLAGCLSQGCFVAVCFIFECFLLGIMAYDRYIAICFPLRYTVLINPFFCVIVVLISLFISIVNGLLHSLMVLHLSFCTDLEILHFFCEIAQILKLACSDNLINNILIFVTASSFAGVPLCGIIFSYVHIVSTVLKMPSSEGKYKAFSTCGSHLSVVSLFYGTGFGVYITSVVIDSPKEIAIASVMYSIVPPMLNPFVYSLKNRDMKEALKKVIGRTVSLP

SEQ ID NO: 1872 - protein, 317 aa, Mus musculus
MCKMEVENKSVVFDIFLHGLTDDTELQPFIFGLFLCMYLITIFGNLLIILAIICDSHLHTPMYFFLCHLAFNDMYLISITVPKMLVNIQTQDQRITFAGCLSQGCFVAVCTIFECFLLGIMAYDRFIAICYPLRYTVLMNPCFCVILTLISLFFSIVNGLLHSLMVLHLSFCTDLEILHFFCEIAQILKLACSDSLINNILIFVTSSIFAGVPLCGIIFSYVHIVSTVLKMPSLEGKYKAFSTCGSHLSVVSLFYGTGFGVYISSNVIDSPKKIAMASVMYSIVPPMMNPFIYSMRNRNMKEALKKVIGRKLLFSDV

SEQ ID NO: 1873 - protein, 295 aa, Mus musculus
MGLSDDLQLQPILFGLFLSMYLVTLLGNLLIILTVSSDSHLHSPMYFFLSNLSLADVSFTSTTLPKMIVDIQTHNRAISYSGCLTQMSFFMLFGCLDSLLLTAMAYDRFVAICHPLHYQFIMNPRLCGLLVFLSVLISLFVSQLHNSVVLQLTYFKSVDISHFFCDPSQLLNLACSDTFTNNIVMYFVGAISGFLPISGIFFSYYKIVSSILRMPSPGGKYKAFSTCGSHLSVVCLFYGTGLGVYLSSAVSLSPRKGAVASIVYTVVTPMLNPFIYSLRNQDIKRAMWRLLRKTV

SEQ ID NO: 1874 - protein, 306 aa, Mus musculus
MEPYNLTGALEFLLLGLSEDPELQPVLFALFLLIYLLTVLGNVLIILAISSDSHLHSPMYFFLYNLSLSDMGFSSTTIPKMLINMQTHNKSITYAACLTQVSFFTLFGCMDSLLLTVMAYDRWVAICRPLYYQVILNPGLCRRLVLMLFFISYMNSLVHYFIVSQLKFCTNMEIPHFFCDIPELLKLACSDTSINNLFRFLLSIIFGFLPVSGIFYSYYKIISSIIRVPSLLGKYKAFSTCGSHLSVVCLFYGTGLEAYLSSTISRSTRENMLASVIYTMRVPMINPFIYSLRNRAMKKALQKIFS

SEQ ID NO: 1875 - protein, 319 aa, Mus musculus
MFIFKSCSNNIELQNLTLVSEFHLMRISDDPELQPILFGLFLSMYLVTVLGNLIIILAVNSDSNLHTPMYFFLCNLSLADICFISTTVPKMIVNIQTHSKEIIYVGCLTQMSFLILFGCMDGLLLTVMAYDRFVAVCHPLHYSLIMNPRLCGSLVCLSLLISLVDSQAHNLIALQIIYFKDVKISNFFCDPAQLLNLACFNTFINNIVMYFVGAISGLLPISGIFFSYYKIVFSILKIPSKGGRYKAFSTCGSHLSVVCLFYGTAIGVYLGSAVSHSPRSTAVASLIYTVVTPMLNPFIYSLRNKDIKRAVKRLHRRML

SEQ ID NO: 1876 - protein, 295 aa, Mus musculus
MSLSENVELQPFLLVLFLSFYMVTVLGNLLIILAVCSDFHLHTPMYFFLSNLSWSDICLISTIVPRMIWDIGTQSRVISYVSCLTQMSMFIVFGCMDSMLLTVMAYDRFVAICHPLHYKIIMNPNLCAFLLLASVLASLVDSQVHNLIVLQFTYFNDMEISNFFCDPSQLLNHNCSEMFTKNIVIHFIGVFFGLFSTTGIIFSYYKIISSILRIPTKDGKYKAFSTCGSHLSVVCLFYGTSIGVYIGSTASNSPKNCAIASLMYTVVTPMLNPFIYSLRNRDIKTALWQLQRRAM

SEQ ID NO: 1877 - protein, 309 aa, Mus musculus
MMKLKMENITYVSQFYLLRVSDDPELQPFLSGLFLSMYLISVLGNLIIILIVSSFSHLHTPMYFFLSILSLADIGFISTTVPNMIAELQIHSPVISYVGCLTQMSLFIIFACMDSMLLAVMAYDRFVAICHPLRYAIIMNPCRCGILVLMSFSASLFESLLHNLVALQLKCFKDVAIANFFCHPSQLLNLSCNNTFNNNILMYVIGVILGVFPLSGILISYFKIISSILRITSSSGRYKAFSTCGSHLAVVCLFYGTGLGEYFGSLLSHSSGNNVVASLMYTVVTPMLNPFIYSLRNQDISDSLKRLHF

SEQ ID NO: 1878 - protein, 312 aa, Mus musculus
MINNDVENLKDVLEFHLMALSEDPELQLLLFGLFLSVYLVTVLGNLLIILIIIFDSNLHNPMYFFLSNLSLIDILFISTTIPKMIVGIKMHSRVISYAGCLTQMSLFLFFVCMDDMILNVMAYDRFVAICHPLHYTVLMNPQVCVILILLSFSVSVFDSQLHNLIALQDTCFRDVEIANFFCHPSQLLNLACTNTLSSNIVIYFIGVILGIFPVLGIILSYCKIVFSILKIPSSSGKYKAFSTCGSHLLVVCLFYGTGIGVYLGSAVSHSPRKNAVASLMYTAVSPMLNPFIYTLRNRDISNALKRFHSRFS

SEQ ID NO: 1879 - protein, 295 aa, Mus musculus
MSLSENVEVQPFLLVLFLSFYMVTVLGNLLIILAVCSDFHLHTPMYFFLSNLSWSDICLISTIVPRMIWDIGTQSRVISYVSCLTQMSMFILFACMDSMLLTVMAYDRFVAICHPLHYKIIMNPNLCAFLLLASVLASLVDSQVHNLIVLQFTHFSGMEISNFYCDPSQLLNLNCSEMFTKSIVIHFIGVFFGLFSTTGIISSYYKIISSILRIPSKDGKYKAFSTCGSHLSVVCLFYGTATAVYIGSTSSYSPENCAVASLMYTVVIPMLNPFIYSLRNRDIKIALRKLQRRAI

SEQ ID NO: 1880 - protein, 311 aa, Mus musculus
MKNRTSVSEFILLGLTSDPKLNILIFIFLFITYILSITGNLTIITLTLIDSHLKTPMYFFLRNFSFLEISFTTVSIPRFLVSIVTGDMTISYNSCMAQVFFFILLGSTEFFLLTAMSYDRYVAICKPLHYTTIMNSRVCMQLIVSSWLAGFLIIFPPVIMGLQLDFCDSNIIDHFTCDSSPLLLISCTDTAFLELLAFFLAVFTLMVTLTLVILSYSFILRTILRIPSAEQRKKAFSTCSSHMIVVSISYGSCIFMYVKTSAKEGVALTKGIAVLNTSVAPMLNPFIYSLRNKQVKESFRNLIKKCISNKI

SEQ ID NO: 1881 - protein, 319 aa, Mus musculus
MKNQSVEIVFILLGLTDDPQLQILIFLFMFFNYILSLIGNLIIIFLTLLDLRLKTPMYFFLRNFSFLEMAFTSSCIPRFLMSILTGDKTISYGSCLTQLFFFFLLLITEFYLLAAMSYDRYVAICRPLHYPIIMNSKVCHLLVLSSWVTGFLSIFPPLMLGLKLDFCASKLIDHFLCDTSPVLQLSCTDTRFIEWMAFVIAIMTLIITLILVILSYTLIIKTILKFPSAQQRKKAFSTCSSHMVVVSITYGSCIFMYIKTSAKERVSLNKGVAVLNTSVAPLLNPFIYTLRNQQVKDAFKQVLQRLCHSQNSELRFRHQ

SEQ ID NO: 1882 - protein, 308 aa, Mus musculus
MKNYTIITEFVLLGISGNRELQVVIFVFLLITYIVSITGNLTIILLTLLDSHLKTPMYYFLRNFSFLEIMFTSVSIPRFLASIITQVKTISYNNCFAQLFFFIFMGVTEFFLLTAMSYDRYVAICKPLHYTLIMNQKVCTLLVLTSWLAGFLTIFPPLMLVLKLDFCASNVIDHFCCDYFPLLQLSCSDTWLLEVIGFYVALVTLLFTLALVILSYMYIFRTILRIPSANQRKKAFSTCSSHMIVISMSYGSCIFIYVKPSANERASLTKTVAILSTSVAPMLNPFIYTLRNQQVKQAFKDLIHKVVF

SEQ ID NO: 1883 - protein, 313 aa, Mus musculus
MKNQSVEIVFILLGLTDDPQLQILIFLFMFFNYILSLMGNLVIIFLTLLDLRLKTPMYFFLRNFSFLEIAFTTACIPRFLMSILTGDKTITYNACVAQLFFFFLLLITEFYLLAAMSYDRYVAICRPLHYPIIMNSKVCHILVLSSWMTGFLSIFPPLMLGLKLEFCASKTVDHFLCDTSPVLQLSCTDTRFIEWMAFVIAIMTLIITLILVILSYTLIIKTILKFPSAQQRKKAFSTCSSHMVVVSITYGSCIFMYIKTSAKERVSLNKGVAVLNTSVAPLLNPFIYTLRNQQVKDAFKQVLQRLCHYQTVN

SEQ ID NO: 1884 - protein, 319 aa, Mus musculus
MKNQSLKIEFILLGLTDDPQLQIPIFLFLFFNYILSLMGNYMIIFLTLLDPHLKTPMYFFLRNFSFLEIAFTTVCIPRFLISILSGDRTISYNACAAQLFFFFLLGSTEFYLLAAMSYDRYVAICRPLHYPIIMNSKVCHQLVLSSWVTGFLVVFPGLLLGLKLDFCASKTIDHFLCDSSPLLQLSCTDTHFIELLDFALAVMTLVITLILVILSYTLIIKTILKFPSAQQRRKAFSTCTSHMVVVSITYGSCIFMYMKTSAKERVTLNKGVAVLNTSVAPLLNPFIYTLRNQQVKEAFKHVLHRFCSLQNSETRFRHK

SEQ ID NO: 1885 - protein, 311 aa, Mus musculus
MNHTEITEFILLGLSDDPDLQIVIFLFLLITYMLSVIGNLTIIVLTFIDTHLQTPMYFFLRNFAFLEVSFTSVCIPRFLGSIVTRNKTISYNNCAAQLFFFIFMGVCEFYILTAMSYDRYVAICKPLHYTTIMNRKLCTLFVLCAWLAGFLTVFPPLMLLLQQDYCASNVIDHFACDFFPLLQLSCSDTLFLEVIGFYVALVALLFTLALVILSYMYIIRTILRIPSTSQRKKAFSTCSSHMIVISLSYGSCIFMYANPSAKEKASLTKGVAILNTSVVPMLNPFIYTLRNQQVKQAFKGAVHKLVFSVSK

SEQ ID NO: 1886 - protein, 312 aa, Mus musculus
MKNHTRVTVFIIAGLTDDPQWKVVLFIFLLLTYLLSITGNLAIITLTLVDTHLKTPMYFFLRNFSFLEFSYTTTCIPKLLVTMATGDKTISYGNCLTQVFFAFLFGASEFYLLAAMSYDRYVAICKPLHYMTIMNNKVCVQLVLSCWLAGFFVIFPPLLLGLNLDFCASNIVDHFYCDTTPLLQLSCTDTQLLETMGFVSALVTLLLTLVMVIVSYIYIAITILKIPSASQRKKAFSTCSSHMIVISLSYGSCIFMYVKPSVKQRVSISKGISVLNTSVAPLLNPFIYTLRNQQVKKAFINTVHRIVSFSKK

SEQ ID NO: 1887 - protein, 312 aa, Mus musculus
MRNHTETTEFILLGLSDDPKLQVVIFVFLFITYTLSITGNLTIITLTLLDSHLQTPMYFFLRNFATLEVSFTTVCIPRFLGTIISGDKTISFNNCIAQLFFLILFGVTEFYLLAAMSYDRYIAICKPLHYLTIMSQKVCKMLVFASWLVSFLIIFPALMLLLQLDYCVSNIIDHYTCDYFPLLQLSCSDTKFLEKMGFSCAVFTLMFTLALVFWSYTYIIRTIVKIPSASQRSKAFSTCSSHMIVISISYGSCIFMYIKPSAADRASLTKGVAILNTSVAPMLNPFIYSLRNQQVRQAFMNMARKMVFFTSK

SEQ ID NO: 1888 - protein, 311 aa, Mus musculus
MRNHTITTFILLGLTDDPQLKTLIFIFLFLSYVLSMTGNLTIISLTFIDPHLKTAMYFFLQNFSFLEISFTTACIPRYLYNISTGDKTITYNNCAIQIFCVDLFGVTEFFLLAIMSYDRYVAICKPLHYSTIMSSRICTRLILCCWAAGLFVILPPLSLGLKLEFCDSNVIDHFVCDANPLLKISCTETWLIEQIVIVCAVFTFIMTLVCVSLSYIYIIRTILRFPSAQQRKKAFSTCSSHMIVVSITYGSCIFIYIKPSAKDSVTINKGVTILTTSIAPMLNPFIYTLRNKQVKQAFNDSVKRIVLFFQK

SEQ ID NO: 1889 - protein, 317 aa, Mus musculus
MKNNTITTFILLGLTDDPQLQIPIFVFLFFAYMLSITGNLTIISLTILDSHLKTPMYFFLQNFSILEISFTSACIPRYLYNIATGDRSITYNVCVIQVFFTDVFGVIEFFLLAIMSYDRYVAICKPLHYVTIMSSKVCQTLVLCCWSAGLLIILPPLTLFLNLRFCDSNVIDYFFCDASPILKISCSDTWLIEQLVIVCAVLTFILTLVCVTLSYVHIIKTILRFPSAQQRKKAFSTCSSHMIVVSITYGSCIFIYINPSAKESVAINKGVAVLMTSIAPMLNPFIYTLRNKQVRQAFSDSFKKIAIISMKKENVQI

SEQ ID NO: 1890 - protein, 312 aa, Mus musculus
MRNHSMVTEFLLSGISDTPEVQVVIFILLFIAYILSVTGNLTIITLTLLDSQLKTPMYFFLQNFSFLEIIFTSVSVPRFLGSIITEVKTISYNNCLTQLYFFLSLGVSEFFLLTAMSYDRYVAICKPLHYVIIMNQKVCTLLVLTSWLIGFLSIFPLIMLIHKLDFCASNTIDHFCCDYFPILQLSCSDTRLLEAFGFYCASITLLFTLALVILSYICIINTILRFPSASQRKKAFSTCSSHMIVISISYGSCIFMYVKPSANERASLTKGVAVLNTSIAPMLNPFIYTLRNQQVKQAFKDFINKVMFNRNK

SEQ ID NO: 1891 - protein, 312 aa, Mus musculus
MRNHSMVTEFVLLGISDTPEVQVVIFILLFIAYILSVTGNLTIITLTLLDSQLKTPMYFFLQNFSFLEIIFTSVSIPRFLESIITKVKTISYNNCLTQLYFFLSLGVSEFFLLTAMSYDRYVAICKPLHYVIIMNQKVCTLLVLTSWLIGFLSIFPLIMLIHKLDFCASNTIDHFCCDYFPILQLSCSDTRLLEAFGLYCASITLLFTLALVILSYICIINTILRFPSASQRKKAFSTCSSHMIVISISYGSCIFMYVKPSANERASLTKGVAVLNTSIAPMLNPFIYTLRNQQVKQAFKDLINKLMFNRNK

SEQ ID NO: 1892 - protein, 311 aa, Mus musculus
MRNHTVTTFILLGLTDDPQLKTLIFIFLFLSYMLSMTGNLTIISLTFIDSHLKTAMYFFLQNFSFLEISFTTACIPRYLYNISTGDKTITYNNCVIQIFCTDLFGVTEFFLLAIMSYDRYVAICKPLHYSTIMSSRICARLILSCWAAGLFVILPPLSLGLKLKFCDSNVIDHFVCDANPLLKISCTETWLIEQIVIVSAVLTFITTLLCVSLSYIYIIRTILRFPSAQQRKKAFSTCSSHMIVVSITYGSCIFIYIKPSAKDSVTINKGVMVLTTSIAPMLNPFIYTLRNKQVKQAFNDSVKRIALFFQK

SEQ ID NO: 1893 - protein, 313 aa, Mus musculus
MSVANESISREFILLGFSDRPWLELPLFVVFLVSYILTIFGNMMIILVSRLDSKLHTPMYFFLTNLSLLDLCYTTSTVPQMLINICSTRKVISYGGCVAQLFIFLALGCTECFLLGVMSFDRFVAICRPLHYSVIMHQRRCLQLAAACWISGFSNSVLQSTWTLQMPLCGHNRVDHFLCEIPALLKLSCVDTTAIESEQFFISVVFLLIPVTLILISYAFIVQAVLRIRSAEGRRKAFGTCGSHLIVVVLFYGTAIYMYLQPPSPTSKDRGKMVSLFYGIITPMLNPLIYTLRNKEVKGAFKRLVTRIILSRK

SEQ ID NO: 1894 - protein, 313 aa, Mus musculus
MSWANESITGEFVLLGFSDQPWLEFPLFVVFLTSYIVTIFGNLNIILVSHLDPKLHTPMYFFLTNLSVIDLCYITCTVPQMLVNLRSIRKVISFGGCVVQLFMFLALGATECVLLPVMSFDRFVAICRPLHYSVIMHQRLCLQLAAVSWIIGFGNSVWLSILTLQLPRCGHYVIDHFLCEVPALLKLSCVDVTANEAELFFVSVFFHLTPLSLILTSYAFIARAILKIQSAEGRQKAFGTCSSHLIVVSLFYGTALSVYLLPPSPHSKNRRKMVPLFYGIIAPMLNPLIYTLRNKEVKDAFKRLIKRVFLSKN

SEQ ID NO: 1895 - protein, 317 aa, Mus musculus
MWLQVMEKENTSSFEGFILVGFSDRPHLELILFVVVLSFYLLTLLGNMTIILLSALDSRLHTPMYFFLANLSFLDMCFTTGSIPQMLYNLWGPDKTISYVGCAIQLYFVLALGGVECVLLAVMAYDRYAAVCKPLHYTVIMHPRLCGQLASVAWLSGFGNSLIMAPQTLMLPRCGHRRVDHFLCEMPALIGMACVDTMALEALAFALAIFIILAPLILILISYGYIARAVFRIKSAAGRRKAFNTCSSHLIVVSLFYGTIIYMYLQPANTYSQDQGKFLTLFYTIVTPSVNPLIYTLRNKDVKEAVKKVLGKGSIEV

SEQ ID NO: 1896 - protein, 314 aa, Mus musculus
MHALTVNAMINQSCQEQFILLGFSDRPRLESILFVFVLIFYLVTLVGNIIIILVSYLDPCLHTPMYFFLTNLSFLDLCFTTSSIPQLLFNLGGQDKSISYIGCAVQLFMFLGLGGTECVLLAVMAYDRFTAICKPLHYSVIMHSQLCWTLVSVAWSVGLLNSLVMSPVTMKLPRCGRCQVRHFLCEMPALIKIACVDTVAVESTVFILSVIIVLVPLTLILISYSYIALAVMRIKSASGRRKAFNTCGSHLTVVSLFYGNIIYMYMQPGHKASQDQGKFLTLFYNLVTPMLNPVIYTLRNKDVKGALKRLVTTK

SEQ ID NO: 1897 - protein, 308 aa, Mus musculus
MGTSNVSSNSDFILMGLLSYTGPHLVLFFLMATVFIIGLLGNTTLLFLIATDSRLHTPMYFLLSQLSLLDVGFPLVTIPKVVAEFLQGQNVISFGGCATQMFFLMLMGVSEGVLLSLMSYDRYVAVCHPLHYQVLMRNQVCLVMVGASWFSGALVASIQTSITLQFPYCASHTVDHFFCELPALLKLSCADTSAYELALSISGVLILLLPLSLIFISYGHVLGAVLLMRSAEARHKAFTTCSSHVTVVGLFFGAAVFIYMVPGSYHSPKQDNVVSLFYSLITPTLNPLIYSLRNREVRMSLGQGYGQV

SEQ ID NO: 1898 - protein, 309 aa, Mus musculus
MKTPSNSTEADFILLGLFSHTHAHSLLLSVVLVIFTASLMGNTLMILLICRDPRLHTPMYFLLSQLSLMDMMLVSTIVPKMAANYLTSTRSISPAGCGSQIFLFLTLAGGECFLLAAMSYDRYVAICFPLRYHVLMNPKLCAYLTVGSWLLGAADGLMQAGTILSFPFCHSRTINHFFCEAPSLVRLACADTKVFEFFMYICCILMLLIPLSLVLASYSLILATVLRMRSSAARKKAFTTCSSHLAVVGLFYGAIIFIYMRPKSHQPGKSDKVVSAFYTIFTPVLNPLIYSVRNKEVKGALRKWLQKTV

SEQ ID NO: 1899 - protein, 308 aa, Mus musculus
MSNHTRVTHFILRGFSDVPQLRLVLIPFFLLFYTFGILGNFSIITAVIRDSRLHSPMYFFLKNLSFLDICYTSATIPKAVVISLTGSGVISYQECVAQLYMFITLCGTECFLLTAMAYDRCLAILRPLIYGTIMSHKYCSALVVTAWVGGAIYSAFHTFNTFSLPYCGPNVVDHFFCDMPPVMRLSCTDYHLNEEVGFAVIGCIIMSSFALTVVSYIGIVATVLRIPSVEGRWKAFSTCSSHLTTVILFYGTGSFVYLRPASQYSPTLDPLASIFYSVVTPSLNPVIYCLRNKDMKFALQKLYCGRKY

SEQ ID NO: 1900 - protein, 308 aa, Mus musculus
MSNHTRVTHFILRGFSDVPQLRLMAIPVFLLIYTFGLLGNLSIITAVTRDSRLHSPMYFFLKNLSFLDICYTSATIPKAVVISLTGSGVISYQECAAQLYIFLTFSSSECFLLTAMAYDRCLAILRPLLYGTIMSQKYCSALVVTAWVGGAIYSAFHTFNTFSLPYCGPNVIDHFFCDIPPVMRLSCTDYHLSEEVGFAVSSCIVMSSFALTVVSYIGIVATVLRIPSVEGRWKAFSTCSSHLTTVILFYGTGSFVYLRPASQYSPTLGRLASIFYSVVTPSLNPVVYCLRNKDMKFALQKLYCGRKY

SEQ ID NO: 1901 - protein, 316 aa, Mus musculus
MNLGNESAPKIFILLGFSSHPWLEMPLFIMVLVAYVCTVLGNISIIVVSRRDPQLDSPMYFFLSNLSFLDLCFTTTTIPQLLRNLWGPDKSISYGGCVTQFYIFHFLGATECILLAVMSLDRYIAICKPLRYPAIMHQQLCILLVSMAWLSGLANSLLQSTLTVKLPFCGNNKVDNFLCEVPVMIKMSCANTAFNIAMLSIVGTFYSLVPLSLILISYGFIVATVLRIRSSEGKKKAFNTCGSHVVVVTLFYGPVISMYVQPSSSNSQDKNKLLSLFYSLVTPMLNPFIYTLRNKDMKGAMKRLLVSLYHKGAEQT

SEQ ID NO: 1902 - protein, 314 aa, Mus musculus
MEINNKSSETDFILLGFSSRPQLEHIISAVVFVFYIVTLVGNTTIILVSYLDSQLHTPMYFFLSNLSFVDLCYTTSIVPQMLVNLWGPKKSITYGGCVLQFFFALDLGATECLLLAVMAYDRYAAVCQPLHYTVIMHPVLCQKMVLSAWLGGLGSALILCSLTLKLPRCGHREVDNFFCEMPALIKMACVYSRVIEIVVFTLGVIFLLVPLSLILISYAVITQAVMKIKSATRWRKVLNTCGSHLTVVTLFYGTLIYMYMKPQNTISHEEGQFFTLFYTIVTPSLNPLIYTLRNKDVKNAVKRILGMDKHSGKV

SEQ ID NO: 1903 - protein, 316 aa, Mus musculus
MSVNRISADFPEDFILMGFTKYPWLDLPLFFVLLTSYMFTLLGNIAIILVSQLDSQLQSPMYFFLTSLSFLDLCFTTTTVPQMLFNLQGPNKNITYIGCMAQAYVFHWLGCTECVLLGIMALDRYVAVCKPLRYSVIMDHRLCLQLSGAAWLTGLANSLLQSTLTIQLPLCGNRMLDHFFCELPGLIKMSCGDTTVNEVTLAVVATFFIMGPLSMILVSYSYIAQTVFRMPSAAGRLKAFNTCSSHLLVVSLFYGPGIYIYMQPSEDGSQDLIKVLTLFYCVITPMANPFIYTLRNKDVIGALKRLLRKAISTKGI

SEQ ID NO: 1904 - protein, 316 aa, Mus musculus
MAYEVMNQTSATTFILVGFSEYPQLQIPLFLLFLTIYSVTLMGNLGILVVIKGNPKLHTPMYFFLSHLSFLDICYSSVFTPKLLQILIMEDRTISFIGCMIQFFFICTFVITEMFMLAVMAYDRFVAVCNPLLYTVVMPFQFCALLVAGTYMIGGLCAVILIYTLLQLSYCEYGIINHFGCEYSAVISVSCSDSSFSQLACLVISIFSESSSVLITLASYVFIVVTIIKMPSKGGLRKAFSTCTSHLTAISIFHGIILLLYCVPNSNSSRLFVKVATALYTVMIPMLNPLIYSLRNKDVKDTVRRLISSKLHSHLT

SEQ ID NO: 1905 - protein, 312 aa, Mus musculus
MINQSSVTTFILVGFSEYPHLQPPLFLMVMTIYTVTLVGNVGIILVRRINPKLHTPMYFFLSHLSFLDICYSSVVTPKLLEILIVEHRTISLNGCMTQFFFGCACVITEMFMLAVMAYDRFVAVCNPLLYTVAMSHQLCALLVAGSYMWGGLCAVIITYTLVELSYCEPGIIDHFGCEYSAIVSVSCSDPSFSQMVCLVISILSEGSSLLITMASYVFIVVTIIKMPSKDGLRKAFSTCTSHLTAISIFHGIILLLYCIPNAKSSKLLVKVATVLYTVLIPMLNPLIYSLRNKDVKETVKRLISSKLHSQTI

SEQ ID NO: 1906 - protein, 303 aa, Mus musculus
MYNHTMTEFILFGLTQDPEQQKAIFGVFLILYLMTLMGNFLIMVTIKMSQTLGSPMYFFLFYLSFADACFSTTTAPRLIADALLQKKIITYNECMTQVFAVHFFGCMEIFVLILMAFDRYVAICKPLRYTAIMSQYICGVLVILAWIGSCIHSSAQIFLALRLPFCGPNVIDHYFCDLQPLLKLACMDTYVINLLVVSNSGAICTVSFIVLLISYIVILYSLRSHSAEGRRKALSTCTSHIIVVILFFGPCIFIYTRPPTTFPIDKMVSLFYTIGTPVLNPLIYTLRNAEVKHAMKKLWGNKV

SEQ ID NO: 1907 - protein, 303 aa, Mus musculus
MHNYSVTEFILFGLTQDPEKQKAIFGVFLILYLMTLIGNFLIVMTIKMSQTLGSPMYFFLFYLSFADACFSTTTAPRLIIDALSQKKIITYNECMTQVFAAHFFGCMEIFVLILMAIDRYVAICKPLRYTTIMSQRICGILVILAWVGSCIHSSAQIFLALRLPFCGPNVIDHYFCDLQPLLKLACMDTYVINLLVVSNSGAICMVSFTLLLISYIFILYSLRNHSVEGRRKALSTCTSHFIVVVIFFGPCIFIYTRPPTTFPIDKMVSVFYTIGTPLLNPLIYTLRNAEVKIAMKKLWCGKV

SEQ ID NO: 1908 - protein, 317 aa, Mus musculus
MELYNLTSNLEFLLLGLSEDPELQPVLFALFLLIYLLTVLGNVLIILAISCDSHLHSPMYFFLYNLSLSDMGFSSTTIPKMLINLHAHNRTITYAECLTQVSFFFLFGCMDSVLLAVMAYDRWVAICHPLHYQVILNPRLCRYLVVMSFCISLIDSQVHCFMVSQLKFCTNIKIPHFFCDVPELLKLACSDTSINSIVIFLVSIIVGFLPASGIFYSYYKIISSIVRVPSSGGKCKAFSTCGSHLSVVCLFYGTGLGVYLSSSISSSSKESVVTSVMYTMVVPMINPFIYSLRNKDIKKALQKIFSQIIMLPTYIIP

SEQ ID NO: 1909 - protein, 312 aa, Mus musculus
METVNQTIISEFILLGLSDDPTLQPFIFTLFLTIYLITTLGNLLIILAVSSDSQLHTPMYFFLCNLSFNDICLINTTIPKMLVNIQREDHTITYTACLSQVYLILNFAGIENCLLAVMAYDRYVAICHPLKYTVIMNQYVCAMLLLFSLFLSIVHALFHTLMILLLSFCTEIEIPHFFCELAQIIRLACSDNFINYLLVYTVSVLFFGVPVFGIILSYIHIISSVLKMSSLGGKYKAFSTCGSHLSVVSLFYGTGFGVHISSAFTDSPKKTVVASVMYTIITQMLNPFIYSLRNKEMKKAFRKITSKIPFLL

SEQ ID NO: 1910 - protein, 309 aa, Mus musculus
MEPYNSTGTLEFILLGLSEDPELQFILFALFLLIYLLTVLGNVLIILAISCDSHLHSPMYFFLYNLSLADMGFSSTTIPKMLINLHAHNRSTTYAECLTQVSFFILFGCMDSFLLAVMAYDRWVAICHPLHYQVILNPCRCRYLVVMSFCISLIDSQVHCFMVSQLTFCTNIEIPHFFCDVPELVKLACSNTTINDIAMFLSSIITGFLPASGIFYSYYKITSSIFRVPSLLGKYKAFSTCGSHLSVVCLFYGTGIGVYLSSTVSSSSKESMVASVMYTMVVPMMNPFIYSLRNRDIKKALWKIVCKIT

SEQ ID NO: 1911 - protein, 312 aa, Mus musculus
MEPGNQTGTSYFILMRLNYDPTVEPLIFGFFMFTYLVTIVGNLLIIIAVSSDSHLQTPMYLFLSKLSFTDICLSTTTVPNMLKNIHTQDHSISYTGCLTQACFVLSFAVLESSVLAAMAYDRYAAICHPLNYTVIMNPQFCGLLILLSLIISTANSLLQCLMILRLSFCTNNELPLFFCELAQVIKLACSDTLINYILIYLATFIFGGIPISGIIFSYTRIVSSILKISSLRGRYKAFSTCGSHFVVVSLFYGAAVGVYICSAITVSPQITTVSYMMYTVLPQMLNPFIYSLRNRDMKKALGKLITKVSCFL

SEQ ID NO: 1912 - protein, 312 aa, Mus musculus
MEPQNKTFVLQFLLLGFTDDAELQCLIFSLFLFIYLVTILGNLLIILCISSESHLQTPMYFFLSNLSFNDIGLSTATVIKMLVNIQANDQSITYTDCLTQLFFVLAFAYFENFLLTVMAYDRYAAICHPLRYNIIMNPNLCVLLSLNSLFISVMDSLIHTLMVQRLSFCTDLEIPHFFCELDQVIKLSCSDTRIDNIVLFVATCVFGGVPLCGIIYSYYHIMSTILKITSLEGKYKAFSTCGTHLSVVSLFYGAGSMVYISSAISASPGKSAVASVMYSVLPQMMNPFIYSLRNKDMKVAIRNLFSRTISLE

SEQ ID NO: 1913 - protein, 315 aa, Mus musculus
MNNMEKRNQTTFPGFLLLGLTEDPKLQPVFVSLFFSIYLITILGNLLIILISISDAHLHTPMYLFLSNLSLNDICLSTSTIPKMLVNIKENSQSITYKGCLTQMSFVLIFCGMENCLLAVMAYDRYIAICHPLRYTVIMEPCFCVLLILLSLLISVVDTLMHSLMVLRLSFCTHLEISNFICELPQILKLACSDTLIDNILIYLSACIFTGIPISGIVFSYVHIISSILRMSSLEGKHKAFTTCGSHLSVVSLFYGTAFGVYITSIIMDSSRNTAVASVMYSVVPQMLNPFIYSLRNRDMKEAMGKFFSRMASFL

SEQ ID NO: 1914 - protein, 315 aa, Mus musculus
MNNMEKRNQTAFPGFLLLGLTEDPKLQPVLVSLFFSIYLVTIFGNMLIVLISISDSHLHTPMYLLLSNLSLNDICLSTSTIPKMLVNIQENIQSITYKGCLTQMNFVLIFGGMENCLLAVMAYDRYVAICHPLRYTVIMEPCFCILLILLSLLISIVDSLMHSLMVLRLPFCTHLEIPSFFCELPKMLKLACSDTLIDNILIYISSCIFAGIPLSGIVFSYIHIMSSILRMSSSEGKHKAFTTCGSHLSVVFLFYGTGFGVYITSIIMDSSRKTAVASVMYSVVPQMLNPFIYSLRNRDMKDTMRKFFSRIASVL

SEQ ID NO: 1915 - protein, 312 aa, Mus musculus
MEVDSNSSSGSFILMGVSDHPHLEIIFFAVILASYLLTLVGNLTIILLSRLDARLHTPMYFFLSNLSSLDLAFTTSSVPQMLKNLWGPDKTISYGGCVTQLYVFLWLGATECILLVVMAFDRYVAVCRPLHYMTVMNPRLCWGLAAISWLGGLGNSVIQSTFTLQLPFCGHRKVDNFLCEVPAMIKLACGDTSLNEAVLNGVCTFFTVVPVSVILVSYCFIAQAVMKIRSVEGRRKAFNTCVSHLVVVFLFYGSAIYGYLLPAKSSNQSQGKFISLFYSVVTPMVNPLIYTLRNKEVKGALGRLLGKGRGAS

SEQ ID NO: 1916 - protein, 307 aa, Mus musculus
MAPVNQSAITMFILQNFVDDPWIQDVLFCLLFALFMAAIAGNGLIIATIHSSPNLHTPMYFFLVNLALMDMICTVTVLPKVLQSLVAENSISYGGCLIQMFVFSWVLGSELLLFSAMAYDRYLAICRPLHYGTLMSGRVCVALATFVWFIGALNSLVLTCLVLPLSFCGSNLIAHFFCEIPSVLILSCSPTFINNVMTVIADMFLTGLNFLLTMTSYVFIISSILRIRSAEGKKRAFSTCSAHLVVVTLYYSTALYTYVRPALGTAGLLDKVIAIPYTTVTPSLNPLIYTLRNKEFKTSFKKLLFPR

SEQ ID NO: 1917 - protein, 307 aa, Mus musculus
MALVNQSVVTMFILQRFVDDPWIQDVLFCLFFALFMAAIAGNGLIIATIHSSPNLHTPMYFFLVNLSLMDVICTVTVLPKVLQSLVAENSISYGGCLTQMFVFSWVLGSELLLFSAMAYDRYLAICRPLHYGTLMSGKVCVALATFVWFTGALNSLVLTCLMLPLSFCGPNLITHFFCEIPSVLILSCSPTFINDIMTVITDMFLTGLNFLLTMTSYVFIIASILRIRSAEGKKRAFSTCSAHLVVVTLYYSTVLYTYVRPALGTAGFLDKLIAVLYTTVTPSLNPLIYTLRNKEFKISFKKLLFPH

SEQ ID NO: 1918 - protein, 317 aa, Mus musculus
MSSKYLMAWSTGQNLSTPGPFILLGFPGPRSMRIGLFLLFLVMYLLTVAGNLAIISLVGAHRCLQTPMYFFLCNLSFLEIWFTTACVPKTLATFAPRGGAISLAGCATQMYFVFSLGCTEYFLLAVMAYDRYLAICLPLRYGGIMTPGLATRLALGSWLCGFSAIIVPAALIARLSFCGSRVINHFFCDISPWIVLSCTDTQVVELVSFGIAFCVILGSCGITLVSYAYIITTIIKIPSAQGRHRAFSTCSSHLTVVLIWYGSTIFLHVRTSVESSLDLTKAVTVLNTIVTPVLNPFIYTLRNKDVKEALRRTMKGK

SEQ ID NO: 1919 - protein, 313 aa, Mus musculus
MSKGRENETGVSEFLLLGITNDPQQQQILFWAFLCMYLVTVAGNTLIFLAIISDPRLHTPMYFFLANLSFVDVCFTTNLIPRLLAGHVAGTRTISYVHCLTQTYFLISFANVDTFLLAAMALDRFVAICYPLQYHTIITPQLCVGLAAVVWMCSALISLMHTLLMSRLSFCSSIPEISHFYCDAYLLMKLACSDTRVNQLVFLGAVVLFVAPCILIVVSYVRITMVVLQIPSAKGRHKTFSTCSSHLSVVTLFYGTVLGIYIRPPDSFSTQDTVATIMYTVVTPMLNPFIYSLRNKDMKESVTRLLNRGSKSS

SEQ ID NO: 1920 - protein, 313 aa, Mus musculus
MSKGRENETGVSEFLLLGITNDPQQQQILFWAFLCMYLVTVAGNTLIFLAIISDPCLHTPMYFFLANLSFVDVCFTTNLIPRLLAGHVAGTRTISYAQCLTQMFFMISFAHVDTLLLAAMALDRFVAICYPLQYHTIITPQLCVGLAAVVWMCSALISLMHTLLMSRLRFCSSIPEISHFYCDAYLLMKLACSDTRVNQLASLGTLFLFVAPCILIVVSYVRITMAVFQIPSAKGRHKAFSTCSSHLSVVILFYGTILGIYIRPPGSFSIQVSVATIMYTVFTPMLNPFIYSLRNKDMKETVTRILNRDSKPS

SEQ ID NO: 1921 - protein, 305 aa, Mus musculus
MNCSQAPTLILLGLSSDAEKWQPLFSIFLVIYLLGLLGNLLLLLAIGTDVHLHTPMYFFLSQLSFVDLCFITTTAPKMLEALWTGDGSISFSGCLTQLYFFAVFADMDNLLLAVMAIDRYAAICHPLRYSALMTPFRCGVLVSGSWGVTNCVSLTHTLLLSKLYFHTNQEIPHFFCEFGPLLLLSCSDTHLNKILVIILVGILGISAVLCIVSSYGCIFYAVAKVPSAQGKRKALSTCSSHLSVVLLFYSTVFATYLKPPSSSRSSEEVVAAVMYSLVTPTLNPFIYSLRNKDVKSSLRRILNME

SEQ ID NO: 1922 - protein, 313 aa, Mus musculus
MGILSTGNQTVTEFVLLGFHEVPGLHLLFFSVFTILYASIITGNMLIAVVVVSSQRLHTPMYFFLVNLSFIEIVYTSTVVPKMLEGFLQEATISVAGCLLQFFVFGSLATDECFLLAVMAYDRYLAICHPLRYPHLMGPQWCLGLVLTVWLSGFMVDGLVVALMAQLRFCGPNLVDHFYCDFSPLMVLACSDTQVAQVTTFVLSVVFLTVPFGLVLISYAQIVVTVLRVPSGTRRTKAFSTCSSHLAVVSTFYGTLMVLYIVPSAVHSQLLSKVIALLYTVVTPIFNPVIYTLRNQEVQQALRRLLYCKPTEM

SEQ ID NO: 1923 - protein, 312 aa, Mus musculus
MGTNSSLVTEFVLVGFSRLVHLQGILFSLFLTVYLLTVAGNLLIVALVSTDAALQSPMYFFLRILSALEICYTSVTVPLLLHHLLTGRRHISRSGCALQMFFFLFFGATECCLLAAMAYDRYAAICEPLRYQVLLSRRVCVQLAGAAWSCGALVGLGHTSFIFSLPFCGPNAVPHFFCEIQPVLQLVCGDTSLNELQIILAAALIILCPFGLILSSYGRILVTIFRIPSAAGRRKAFSTCSSHLVVVSLFYGTAIFIYIRPKASYDPTTDPLLSLFYAVITPILNPVIYSLRNADVKAALKRSIQKMGPSEI

SEQ ID NO: 1924 - protein, 310 aa, Mus musculus
MMNCSQAPGFILLGLSSNSEKWQPLFSIFLVLYLLGLLGNLLLLLAIGTDVHLHTPMYFFLSQLSLVDLCFITTTAPKMLETLWTGDGSISFSGCLTQLYFFAVFADMDNLLLAVMAIDRYAAICHPLLYPLLMTPCRCRVLVSGSWGVAHCVSLTHILLLSQLYFHTNQEIPHFFCDFGPLLLLSCSDAHLNESLMMALAGVLGISALLCIVSSYGCIFYAVAKVPSAQGKRKALATCSSHLSVVLLFYSTVFATYLKPPSSSRSSGEVVAAVMYTLVTPTLNPFIYSLRNKDVKSSLRRILNMVKSQD

SEQ ID NO: 1925 - protein, 309 aa, Mus musculus
MNCSKAPGFILLGLSSDPEKWQPLFNIFLCLYLLGLLGNLLLLLAIGTDVHLHTPMYFFLSQLSLVDLCFITTTAPKMLEALWTGDGSISFSGCLTQFYFFAVFADMDNLLLAVMAIDRYAAICHPLFYPFLMTPCRCEVLASGSWGIAHCVSLFYTLLLSQFYYHTNQGIPHFFCDSRPLLLLSCSDTHLSEGLMMALSGVLGMSSVLCLVSSYGCIFYAVARVPSAQGKRKSLATCSSHLSVVLLFYSTVFATYLKPPSTSHSSAEVVAAVMYTLVTPTLNPFIYSLRNKDVKSSLRKILNMDKFQG

SEQ ID NO: 1926 - protein, 309 aa, Mus musculus
MNCSQAPTFILLGLSSDAEKWQPLFSIFLVLYLLGLLGNLLLLLAIGTDVHLHTPMYFFLSQLSLVDLCFITTTAPKMLEALWTGDGSISFSGCLTQLYFFAVFADMDNLLLAVMAIDRYAAICHPLLYPLLMTPCRCRVLVSGSWGVAHCVSLTHTLLFSKLYFHNNQEIPHFFCDFGPLLLLSCSDTYLNESLMMALSGLLAISAFLCIVSSYGCIFYAVAKVPSAQGKRKALATCSSHLSVVLLFYSTVFATYLKPPSSSHSSQEVVAAVMYTLVTPTLNPFIYSLRNKDVKSSLRRILNMVKSQD

SEQ ID NO: 1927 - protein, 310 aa, Mus musculus
MSGVSENQTTWLTLVGFGKLKHLGFLPFALFLAIYVATVGGNILIVLAVASSRTLHTPMYFFLCHFSLLEIGYTSNIVPRLLQSFLEGGDLISLVGCLAQFYVFASLAAAECLMLSAMSYDRYLAICHPLHYPVLMSTWCCVRLATGAWFSGFFFSAFTLALAAPLSLCPGRRVIDHYFCDFAPVVGLFCGEVWVMWGAGVSISGCLTLAPFLLIVASYVFILRAVLRIPSSHGRQKAFSTCSSHLSVVAVFYGTLIVVYVAPTEHMPALLRKAFSVFYTVLTPMFNPIIYSLKNQEVKWALRRLCRQLL

SEQ ID NO: 1928 - protein, 311 aa, Mus musculus
MRNRSVVTQFILLGIPNTEGLETMLFVLFLSFYIFTLMGNLLILLAIISSSRLHTPMYFFLCKLSIFDIFFPSVSSPKMLFYLSGNSRAISYAGCVSQLFFYHFLGCTECFLYTVMAYDRFVAICYPLRYSIIMSHRVCAILATGTSFFGCIQATFLTTLTFQLPYCGPNEVDYYFCDIPVMLKLACADTSALEMVGFISVGLMPLSCFLLILTSYSCIVCSILQIRSAEGRRRAFSTCSAHLTAILLFYMPVVLIYLRPTPSPWLDATVQVLNNLVTPMLNPLIYSLRNKEVKASLWKVLRKPAFAPEQL

SEQ ID NO: 1929 - protein, 311 aa, Mus musculus
MAAGNHCTVTEFFLVGLSEKPEFQLPLFLLFLGIYLITVTGNVGMITLIGLSSHLHTPMYFFVRSLSFIDFCQSTVVIPKMLMSFLTEKNIISYSGCMVQLYFFFIFGIAECYTLAAMAYDRYVAICNPLLYNVTMSYQIYNSLISGSYIFAVVCSSLITGFMFRIQFCNLDVINHYFCDLLPLLNLASSNIYINEILILVIATLNVFIPVMTIITSYIFIIATILYIHSSEGKFKGFSTCSTHISAVAIFYGSGAFTYLQPSLLNSMGQAKVSSVFCTTVVPMLNPFIYSLRNKDVSFALKKIFERKKFM

SEQ ID NO: 1930 - protein, 319 aa, Mus musculus
MEDMTSGNNCTVSEFFLAGLSEEPELQLPLFLLFTGIYLITVVGNLGMITLIGISSHLHTAMYFFLSSLSFIDFCQSTVVTPKMLVSFLTEKNIISYLGCMAQLYFFIIFGAAECYTLAAMAYDRYVAICNPLLYTVVMSYQVYSSLISGVYIYAVFCASVHTGVLTRIQFCKLDVINHYFCDILPLLKLACSNTYIDEMLILFFGTLNIFAPTLIIITSYIFIIASIFHIRSREGRSKAFSTCSSHISAVAIFYGSAAFMYLQPSRVNSMDQGKVSSVFYTTVVPMLNPLIYSLRNKDVTVALKKILERKNFMWSEVT

SEQ ID NO: 1931 - protein, 310 aa, Mus musculus
MDNYTLLNEFILLGIPQTQGLETLLFVVFLFIYFFTLLGNSLIFTAIISSSTLHTPMYFFLGLLSVFDMLFPSVTCPKMLFYLSVRSPAISYKGCAAQLFFYHLLGSTEGCLYSVMAYDRYVAICHPLRYMLIMKPGVCVSLVIIAWLVGCLHATILTSLTFQLVYCASNQVDYFFCDLPAVLPLACTDSKLARKVGSINVGFLALMLLFSVCVSYVHIGVAILRIRSAEGRQKAFSTCSAHLTAILCAYGPVIIIYLQRTPNPLLGAVVQILNNIVSPMLNSLIYSLRNKEVKRSLRRVFQNITFHGQK

SEQ ID NO: 1932 - protein, 314 aa, Mus musculus
MTNHTMVTEFTLLGIPETEGLENALLFLFSTMYACALLGNFLILTAITTSPRLHTPMYFFLGNLSIFDLGFCSTTAPKMLSYLSGWGGGISFQGCVVQHFFYHCLGCTLCFLYTVMAYDRFVAICFPLRYTIIMNHRVCCVLATGTWMSGCVHATILTSLTFQLPYCGPSEVSYYFCDMPAVLLLACEDSSLAQRVGFTNVGLLSLICFFLIIVSYTRIGISISKIRSTEGRQRAFSTCSAHLTAIMCVYGPVIVIYLQPNPSPLLSAIIQILHNLVTPTINPLIYSLRNKDVKAALRHVFLKRCLSLEVNENS

SEQ ID NO: 1933 - protein, 314 aa, Mus musculus
MEELNHTPVAEFILAGLTENPELQLPLFLIFLSVYLFTVVGNLGMIVLILISSQLHTPMYYLLSSLSFIDCCQSTVIVPKMLLNFVTEKNVILYPECIAQFYFFCTFVVAKCHMLAAMAYDRYVAISNPLLYKVTMSYQVCLLMVAVVYGIGLISATAHTVFLLRLFFCKADKINHYFCDLFPLLELSCSSTFINEILALSFSAFNIIVPAMTIIGSYIFIIISILHIKSSGGRVKAFSTYSSHILAVAIFFGSTTFMYLQPSSVSSMDQWKVSSVFYTIVVPVLNLMIYSLRNKDVKVALKMLLQKMFPQNKE

SEQ ID NO: 1934 - protein, 310 aa, Mus musculus
MSNYTGQFSDFTLVGFFSQSKHPALLAVVIFVVFLMALSGNTLLILLILSDTHLHTPMYFFISQLSLMDMMYISVTVPKMLMDQVLGNHKISAAACGMQMFLYLSIGGSEFLLLAAMSYDRYVAICHPLRYPVLMNHRICLLLLSVCWLLGSLDGFMLTPVTMTFPICGSREIHHFFCEVPAVTKLSCSDTWLYETLMYVCCVLMILIPVTVISGSYSSILLTVLRMNSAEGRKKALATCSSHMTVVTLFYGAAVYTYMLPASLHTPEKDMVVSVFYTIVTPLLNPLIYSFRNKNVTEAMKKLLGVSIPH

SEQ ID NO: 1935 - protein, 306 aa, Mus musculus
MESGNHSCGTEFTLVGLFQYGHMDTFLFTLIAILFAVALMGNITLVLLIRLDRRLHTPMYFFLSQLSIIDMMYISTTVPKMAANFLSDTKAISFLGCAVQTFVFLTLGGSEALLLGFMSYDRYIAICQPLHYPVLMSRKICCSMVAGAWSSSSINAFMHTVYVFQLPFCGSRMVNHFFCEVPSLLPLVCEDTSQYEHTVLVSGLVILLLPFLAILASYARVLVVVLQMGSGKGQSRAVSTCSSHLTVASLFYVTTLSTYTQPHSLHSPGRDKVVAVLYSIVTPVLNPFIYSLRNKEVMGALRRQRG

SEQ ID NO: 1936 - protein, 306 aa, Mus musculus
METGNHSCGTDFTLVGLFQYGHMDTFLFTVISILFAVALIGNITLVLLIRLDRRLHTPMYFFLSQLSIIDMMCISTTVPKMGANFLSDTKAISVLGCEIQVFMFMSLAGCEALLLGFMSYDRYIAICQPLHYPVLMSRKICCSMVASAWSSSSINALAHTVYVFQLPFCGSRMVNHFFCEVPSLLPLVCEDTSQYEHMIVMSVLVLVLLPFLAILASYARVLVVVFQMGSGKGQSRAVSTCSSHLTVASLFYVTGLCTYTQPHSLHSPGRDKVVAVLYSIVTPVLNPFIYSLRNKEVIGALRRQMG

SEQ ID NO: 1937 - protein, 321 aa, Mus musculus
MAFLHNGNHTAVTEFILLGLTDDPVLRIVLFTIILCIYLVTVSGNLSTILLIRVSSQLHHPMYFFLSHLASADIGYSSSVTPNMLVNFLVKQNTISYIGCSIQFGSAAFFGGLECFLLAVMAYDRFVAICNPLLYSTKMSTQVCVQLVVGSYIGGFLNASFATVSFLFLFFCGPNIINHFFCDFAPLIELSCSDVRISVLVTSFSAGTVTMLTVLVIAISYTYILITILKMRSTEGRHKAFSTCTSHLTAVSLFYGTITFIYVMPKSRYSTDQNKVVSVFYMVVIPMLNPLIYSLRNNEIKGALRRHLGKKIFSQSNILFY

SEQ ID NO: 1938 - protein, 314 aa, Mus musculus
MAFLENGNHTAVSEFILLGLTDDPVLRIVLFTIILCIYLVTVSGNLSTILLIRVSSQLHHPMYFFLSHLASADIGLSSSVTPNMLVNFLVERSTISYLGCGIQLSSAALFGATECFLLAAMAYDRFMAICNPLLYSTKMSTKVCVQLIVGSYIAGFLNASSFLLSFFSLLFCGQNIINDFFCDFAPLAELSCSDVSVFVVVISFSAGTVTMLTVFVIAISYSYILITILKMRSTEGRQKAFSTCTSHLTAVTLFYGTVTFIYVMPKSSYSMDQNKIISVFYMVVVPMLNPLIYSLRNNEIKGALKRHFDRKTFS

SEQ ID NO: 1939 - protein, 314 aa, Mus musculus
MAFLEDGNHTAVTEFILLGLTDDPVLRVILFTIILCIYLVTVSGNLSTILLIRVSSQLHHPMYFFLSHVGSVDIGYSSSVTPNMLVNFLVEKHTIAYLGCGIQLSSAAFFGTAECFLLATMAYDRFVAICNPLLYSTKMSTQTCIQLVVGSYTGGILNASFAIISFFSFLFCGPNRINHFYCDFAPLVELSCSDINVSVVITTIFSASVTIITVFVIAISYTYILITILKMRSTEGRHKAFSTCTSYLTAVTLFYGTVTFIYVVPKSNYSTDQNKVASVFYIVVIPMLNPLIYSLRNNDIKGALKRQLGKKTFS

SEQ ID NO: 1940 - protein, 314 aa, Mus musculus
MAFIYNGSQTTVTEFILLGLTDDPVLKVILFCIILCIYLVTVFGNLSTILLIGVSSKLHHPMYFFLSHLASVDMGLSSSVTPNMLVNFLTEKNTISYLGCGIQLSSAAFFGAVEFFLLAAMAYDRLVAICNPLLYSTKMSSQVCIQLVAGSYVGGFLNASFVTHFFFSFLFCGPNRVNHFFCDLSPMMELSCSDVSISEIVISFSAGSFTMTTLFVIVIPYFYIFITILKIRSTEGRQKAFSTCTSHLTAVTLYYGTIIFIYVMPKSTYSRDQNKVVSLFYMLVIPVLNPLIYSLRNNEIKDALKRQFYRKTLL

SEQ ID NO: 1941 - protein, 310 aa, Mus musculus
MNGGNHTSMTELFILGPTEDPTFCIAFFVIFLGVYMVTLVGNISIITLIRISSQLHTPVYLFLNHLAFVDILYSTLVSVIMLMELLEHELALPVAACAAELCITVLFGSSECFLLAAMAYDCYVAICSPLLYSTLMSSRVCFLLLGMSYVGGCMNGWIFTGCLLNLSFYGPYQIDHFFCDFSPLLKLSCSDVSIIGIIPSISSGSIIVVTVLVIAVFYICILMTILKMHSTDGCHKAFSTCNSYLTAVTLYYGTITFIYVMPKSNYSTEKNKVLSEFYTVVIPMLNHLIYSLKNRDVKDALRKAIVRVYT

SEQ ID NO: 1942 - protein, 308 aa, Mus musculus
MEIKNSSVVTEFILLGLTQSQEAQLLVFALISVFYLIILPGNFLIIFTIRSDSGLTAPLYFFLGNLAFLDASYSFIVAPRMLVDFFCEKKVISYKACITQLFFLHFLGAGEMFLLVVMAVDRYIAICRPLYYSTLMNPRVCYALLLALWLGGFAHSIVQVALILNLPFCGPNQLDNFFCDVPQVVKLACTDTFAVELLMVSNSGLLTLLCFLGLLASYAVILYHVKGHSSEGKSKAISTCTTHIIIVFLMFGPAIFIYTRPFQALQADKVVSLFHTVIFPLMNPVIYTLRNQEVKTSMRKLLSQYVIC

SEQ ID NO: 1943 - protein, 318 aa, Mus musculus
MMNVANKSVVTEFVLLGLSNSWELQIFFFIVFSLFYVATMVSNSMIVLIVISDSHLHSAMYFLLTNLSIIDMSLASFATPKMIIDYLTDHKTISFDGCIAQIFFLHLFTGTEIILLMAMSFDRYIAICKPLRYASIISPQVCIAFVVSSWIVGTMHSMSQVIFALTLPFCGPNKIDSFFCDLPVVFQLSCVDTYVLGLFMISTSGIIALSCFILLFNSYIIVLVTIKHHSSKGSSKALSTCTAHFIVVFMFFGPCIFIYMWPQNSFVIEKILSVFYTIFTPIMNPVIYTLRNHEVNSAMRKLRSKFLNFSTETPSYSL

SEQ ID NO: 1944 - protein, 309 aa, Mus musculus
MDYENGSAVTEFILVGFSRDWQLQIFFFVTFTLIYGATVVGNILIIVTVAANSALHSPMYFLLGNLSFLDMCLSTVTTPKMITDLLAAHKSISFQGCMVQMFFSHFFGGAEMTLLIVMAFDRYVAICKPLHYRIIMSHRLLNRFIILSWTIGFIHTMSQMALTVNLPFCGHNIINNIFCDLPLVIKLACIETYTLELFVIADSGLLSFISFFLLLVSYTVILLIVKHKSPGSLSKALSTLSAHIIVVTLFFGPCIFIYAWPFGSFASNTTLAVFYTVITPLLNPIIYTLRNQEMKKAMRKLWNQQVSCR

SEQ ID NO: 1945 - protein, 322 aa, Mus musculus
MATSVHRNGSLTPVSLQGFVLVGFGGSAETQALLFAVFLVLYVVTILGNLTMIMVITLDARLHSPMYFFLKNLSFVDLCLSSVIIPNALANIFSSSKTISFAGCATQFFFFSLLAATEAVLLAVMAYDRFMAICSPLRYPVTMCPMTCARLVLGTFCVACLNSIVQTSLTFQLPFCSSNYIDYFFCDVPPLLQLACASTAINELVMFGICGFIIVCAVFVVIISYGYITVTILRMRSGSGRHKVFSTCGSHMTAVSLFYGTGFVIYGQPGGVASMEQGKVVSTIYTLVIPMLNPLIYSLRNKDVKDALRRLGQRHSLVKESG

SEQ ID NO: 1946 - protein, 323 aa, Mus musculus
MAIAVYRNGSLSAVSLQGFVLVGFGGGAETQALLFAVFLVLYVVTILGNLTMIVVITLDARLHSPMYFFLKNLSFVDLCYSSAIAPNALANFLSTSKVISFEACATQLFFFSLLATTEAFLLAVMAYDRFMAICSPLRYPVTMCPTTCTRLVLGTYCGGCLNSIVQTSLTFQLPFCSSNRIDHFYCDVPPLLQLACASTALNELFLFGLCGFIIVSTTLAVLVSYGYITVTILRMHSGSGRHKVFSTCGSHMMAVSLFYGTVFVMYAQPGAVASMAQGKVISVFYTLVIPMLNPLIYSLRNKDVKDALRRLGQRHSLVKKGGK

SEQ ID NO: 1947 - protein, 316 aa, Mus musculus
MMTLSWENQTVIVEFVLRGFSSILQLNISLFIMFCIFYILTISGNILIVFLVLCNHALHTPMYFFLVNLSFLEVCYTSNIVPKMLLIIIADQKTISVVGCLAQFYFFGSLAATECLLLAVMSYDRYLAICQPLRYPILMTGSLCFRLAIGSWFCCFFLTAITMVLLCRQNFCGPNEIDHFFCDFAPLIHLSCMDTSLIETVAFATSSAVTLVPFFLITISYSCILIAILRIPSGTGRKKAFSTCSSHLTVVTVFYGTLIATYLVPSANSSQYLRKGFSLLYTILTPMFNPIIYSLRNRDIHEALKKCLSKKSDFLI

SEQ ID NO: 1948 - protein, 312 aa, Mus musculus
MVENFNASWEGYFIFLGFSKWPHLEVVLFVVILIFYMMTLMGNLFIIILSHLDSHLHTPMYFFLSNLSALDLCYTTSSVPQLLFNLWGPKKTISYAGCMLQLYFVLALGTTECVLLVVMSYDRYVAVCKPLHYSVLMNPRFCQLLAAASWVCGFTTSALHSSFTFWVPLCGHRKVDHFFCEVPALLQLSCVDIHANEMTLMVMSAIFVVIPLILILSSYAAIAWTVLEMQSTTRLQKVFGTCGAHLTVVSLFFIPIMCIYLQPSTKSSQDHAKFIALFYTVVTPSLNPLIYTLRNKDVRGAIRRLSRYEREK

SEQ ID NO: 1949 - protein, 317 aa, Mus musculus
MTINKSSGGDFILVGFSDQPQLEKILFVLVLISYLLTLVGNTAIILVSCLDSALQTPMYYFLTNLSFVDICFSTSIVPQLLWNLHGPAKTITATGCAIQLYVSLALGSTECVLLAVMAFDRYAAVCRPLHYATVMHPRLCQSLAGVAWLSGVGNTLIQGTITLRLPRCGNHKIYHFICEVPAMIKLACVDIHANEVQLFMASLVLLLLPLTLILVSYGYIAQALMRLRSALTWGKALGTCGSHMLVVVLFYGTITAIYIQPNSSYAHSQGKFITLLYTVVIPTLNPLIYTLRNKDVKGALKRLVRKNNSTGKKILSR

SEQ ID NO: 1950 - protein, 306 aa, Mus musculus
MEVNRTLVTAFILRGITDLPELQVPMFLVFFFIYVTTMVGNLGLIVLIWKDPRLHTPMYFFLGSLAFADACTSSSVTPRMLVNILDNGKMISLSECMAQYYVFGSSATTECFLLVAMAYDRYVAICNPLLYLVVMSNRVCTCLISGSYIIGFLHPLIHVGLLFRLTFCKSNIIDHFYCEILPLYTISCTDPSINAFVVFIFAAVIQAVTFMSIAVSYAHVLFSILKTKSEKGRRKAFSTCSAHLLSVSLFYGTLFFMYVSPGSGPSKYKNKMYSLFYTIVIPLLNPFIYSLRNKEVLGALRKIMKP

SEQ ID NO: 1951 - protein, 309 aa, Mus musculus
MEKKNETLWTEFVLTGLTCLPQWKPLLFLVFLVIYFMTIVGNLGLITLIWNDPHLHIPMYLFLSNLAFVDTWLSSTVTPRMLFNLLDKGKVISVAECKTQFFSFAISVTTECFLLAAMAYDRYAAICNPLLYPVIMTNRLCVRLLALSFIGGFLHAVIHESFLSRLTFCNSNIIYHFYCDVIPLLKISCTDPSLNYLIIFIFSGSIQVFTIMTVLISYTFVLFTILKKKSDKGIRKAFSTCGAHLLSVSLYYGPLLFMYVHPASSEVDDQDMILSLFYTVIIPVLNPIIYSLRNKQVIDSLKKMLKMMV

SEQ ID NO: 1952 - protein, 309 aa, Mus musculus
MGTENTTLLTEFVLTGLSHQPQWKIPLFLLFLVIYLITIVGNLGLIILIWNDPRLQIPMYLFLGCLALVDTLLSSTVTPKMLLTFTAKSKLISLSECMIQFFSFVMCATMECFLLAAMAYDRYAAICKPLLYPVIMTNRLCVRLLVLTFVTGILHASIHEGMLCRLTFCNSNVIHHFYCDVMPLLKISCTDPSLNYLIVFIFSGSIQVFTISTILGSYTLVLFTILKKKSAKGIKKAFSTCGAHLLSVCLYYGSLLFMYLLPASQKAQDEDMMDSVFYTVIIPVMNPIIYSLRNKQIKDSLEKFLKRNV

SEQ ID NO: 1953 - protein, 313 aa, Mus musculus
MANSTTVTEFILLGLSDACELQVLIFLGFLLTYFLILLGNFLIIFITLADRRLYTPMYYFLRNFAMLEIWFTSVIFPKMLTNIITGHKTISLLGCFLQAFLYFFLGTTEFFLLAVMSFDRYVAICNPLRYATIMSKRVCVQLVFCSWMSGLLLIIVPSSIVFQQPFCGPNIINHFFCDNFPLMELICADTSLVEFLGFVIANFSLLGTLAVTATCYGHILYTILHIPSAKERKKAFSTCSSHIIVVSLFYGSCIFMYVRSGKNGQGEDHNKVVALLNTVVTPTLNPFIYTLRNKQVKQVFREHVSKFQKFSQT

SEQ ID NO: 1954 - protein, 309 aa, Mus musculus
MAVGNSSSVKEFILLGLTQEPELQLPLFFLFLGIYVVSVMGNLGLIVLIVLNPPLHTPMYYFLFNLSFTDLCYSTVITPRMLVGFVKQNTISHAECMTQLFFFCFFVIDECYILTAMAYDRYAAICKPLLYQVTMSHQVCLLMTVGMYVMGLVGAIAHIVCMLRLTFCEGHIINHYMCDIPPLLKLSCTSTYINELVVFIVVGVNVIVPTLTIFITYTLILSNILSIHSAEGRSKAFSTCGSHVIAVSLFFGAAAFMYLKPSSASVDEEKLSTIFYTIVGPMLNPFIYSIRNKDVHIALRKTLKKSMFT

SEQ ID NO: 1955 - protein, 314 aa, Mus musculus
MTLERMAFSNDSSVKEFILLGLTQQPELQMPLFFLFLGIYVVSMVGNLGLIVLIVLNPHLHTPMYYFLFNLSFIDFCYSSVITPKMLVGFVKQNIISHAECMTQLFFFSFFVIDECYILTAMAYDRYAAICKPLLYQVTMSYQVCLLMTGGMYVMGLVGAIAHIVCMLRLTFCEGYIINHYMCDIPPLLKLSCTSTYINELVVFIVVGVNVIVPTLTIFISYTLILSNILSIHSAEGRSKAFRTCGSHFIAVSLFYGASAFMYLKPSSASVDDDKISTIFYIIVGPMLNPFIYSLRNKDVHIALRKTLKKSTFI

SEQ ID NO: 1956 - protein, 313 aa, Mus musculus
MKQMATENDSSVSEFILLGLTDQPELQLPLFALFLLNYTATMVGNLTLMSLILVHSNLHTPMYFFIFNLSFIDFCYSFVFTPKMLMKFFLEKNTISFKGCMTQLFFFCFFVNTESYVLTAMAYDRYVAICKPLLYQAIMLPRICCLLMFMSYLMGFVSAMILTGLMFRLNFCNSNIINHYMCDIFPLLQISCSDTYLNEHVSSAVVGTAIILCSLLILMSYALILFNILNMSSGKGWSKALGTCGSHIITASLFYGSGLLAYVKPSSPETVGQGKFLTVFYTCLVPVLNPLIYSLPNKDVKIAMKKTLKRITS

SEQ ID NO: 1957 - protein, 331 aa, Mus musculus
MLLQMQHMKQMNMENDSSVSEFILMGLTYQPELRWPLFVLFLVNYSATVMGNLSLMTLIFLNSHLHTPMYFFILNLSFIDFCYSFDFTPKMLMGFVSEHNTISFTGCMTQLFFFCLFVNSECYVLTAMAYDRYVAICRPLLYTVVMSPRACSLLMLAAHLMGVSSAIVHTGCIIQLRFCGSKVINHYMCDTFPLLELSCGSSHVNELVSSVSVAVVVVISSLIIVSSYALILVNVMHLSSSKGWSKAVSTCSSHIITVALFYGFGLLAHIKPSSAESVVERKFFSVVYTFVLPLLNPLIYSLRNKDVKLALKRTLKRVTIQGKCLCCSHKS

SEQ ID NO: 1958 - protein, 316 aa, Mus musculus
MATGNHYSVTEFILTGLTEQPELQMPLFFLFLVNCLITVVGNLSLMSLICCNSNLQTPMYFFLFNLSFIDFCYSFAFTPKTLMSFVLEKNIIYFTGCMTQLFFMCLFANSECYLVTAMDYDHYVAICQPLLYMIITSPMTCSLMMFGSYLMGGIGAIVHTGCMIRLNFCGSNIINHYMYDIFPLLQLSCSSIYANELVSSVFVSTVVLASSFLILTSYALILFNITQLSGKGLSKAMSTCSSHIMTVVLFYGFAMLTHVKTSSDESVNQGNFFCLFCTFLVPLLNPFIYSLRNKEVKLALKRTLRRLTVSESLGLP

SEQ ID NO: 1959 - protein, 312 aa, Mus musculus
MVNQSSPVGFLLLGFSEHPQLEKVLFVIVLCSYLLTLLGNTLILLLSTLDPRLHSPMYFFLSNLSFLDLCFTTTCVPQMLFNLWGPAKTISFLGCSVQLFIFLSLGTTECILLTVMSFDRYVAVCQPLHYATVIHPRLCWKLAAVAWMMGLLQSIVQTPPTLKLPFCPHRQIDDFLCEVPSLIRLSCGDTTFNEIQLAVSSVILVVVPLSLILVSYGAIARAVMRINSTEAWKKALRTCSSHLIVVTLFYSSVIAVYLQPKNPYAQERGKFFGLFYAVGTPTLNPLIYTLRNKEVKRAFWRLLGKDGDSKNT

SEQ ID NO: 1960 - protein, 310 aa, Mus musculus
MVNQSSPVGFLLLGFSEHPQLEKVLFVVVLCSYLLTLLGNTLILLLSTLDPRLHSPMYFFLSNLSFLDLCFTTTCVPQMLFNLWGPAKTISFLGCFVQLFIFLSLGTTECILLAVMSFDRYVAVCQPLHYATVIHPRLCCQLAAVAWTIGLVESVVQTPSTLRLPFCPHHQVDDFVCEVPALIRLSCGDTTYNEIQMAIASVFILVVPLSLILVSYGAIARAVLRISSAKGRRKAFGTCSSHLIVVTLFYSSVIAVYLQPKNPYARERGKFFGLFYAVGTPSLNPLIYTLRNKEVKRAFRRLLWKEVKPG

SEQ ID NO: 1961 - protein, 314 aa, Mus musculus
MGKNNNVTEFILLGLTQDPVGQKALFVLFLLMYIVTMAGNLIIVVTIIASPSLSSPMYFFLAYLSLMDAIYSTAISPKLIMDLLCNKKTISFRACMGQLFVEHLFGATEIFLLVAMAYDRYVAICKPLHYLTIMNHRVCILLVMATWVGGFAHSMAQVLFVYDLPFCGPNVIDHFACDMYPLLVLVCSDTYFLGLTVIANDGAICMVVFVILLASYGIILNSLKTHSQEGRRKALSTCSSHIMVVILFFVPCIFMYVRPVSNFPVDKSVTIFYTVVTPMLNPLIYTLRNSEIKHSMLKLWSKILHSDRLRKSCC

SEQ ID NO: 1962 - protein, 302 aa, Mus musculus
MDSPRNVTEFFMLGLSQNPQVQRMLFGLFLLVFLVSVGGNMLIIITITFSPTLGSPMYFFLSYLSFIDTCYSSCMTPKLIADSLHEGRAISFEGCLAQFFVAHLLGGTEIILLTVMAYDRYVAICKPLHYTTTMTRHVCIVLVAVAWLGGILHSTAQLFLVLQLPFCGPNVINHFVCDLYPLLELACTDTYVIGLLVVANSGVICLLNFLMLAASYIVILRTLRSHSAEGRRKALSTCGAHFTVVALFFVPCIFIYMRPSSTLSIDKIVAVFYCILTPMFNPLIYTLRNAEVKNAMKNLWRK

SEQ ID NO: 1963 - protein, 306 aa, Mus musculus
MSNVTEFILLGLTQDPDLQKFLFIVCLIIYLITLAGNMLISVTIFISPALATPMYFFLSYLSVIDGFYSSSIAPKMIYDLISEKSTISFNGCMTQLFVEHFFAAAEIILLMSMAYDRYVAICKPLHYMTIMNRPLCVFLVGAAVILGFIHGGIQILFMAQLPFCGPNIIDHFMCDLIPLLELACTDTHTLGPLIAANSGSLCLLIFSMLVASYVVILRSLRNHSAEGRRKALSTCASHVTVVVLFFVPCSYLYLRPMTSFPTDKAVTVFCTLVTPMLNPLIYTLRNEEVKRVMKKLWGRMRKAGDM

SEQ ID NO: 1964 - protein, 311 aa, Mus musculus
MGNFNTSTQESFILVGFSDWPQLQAFLFVIILIFYSLTIFGNTTIIVLARLDLRLHKPMYFFLSHLSFLDLCYTTSTVPQLLINLRGLDRTISYGGCVAQLFIFLALASTECLILVAMAFDRYAAVCHPLHYTSIMNPILCRALAISSWVGGLVNSLIQTGLVMAMRLCGHQINHFFCEMPIFLKLACEDTEGTEAKMFVARTIVLVCPAVLILGSYVHIAKAVLKVKSMAGRRKAFGTCGSHLMVVSLFYGSGIYTYLQPVHRYSESKGKFVALFYTIVTPMFNPLIYTLRNKDVKGALWKLLGRGTDSG

SEQ ID NO: 1965 - protein, 318 aa, Mus musculus
MGSFNLSLEGFLLVGFSDWPQLELILLVFISIFYSLTLCGNITIIVLTQQDLHLHTPMYFFLAHLSFLDLCFTSSTVPKLLISLSRGDQTISYAGCMTQFFIALLLGGTECVLLVVMAFDRYVAVCRPLHYTSIMHPLLCHALAISSWVGGLVNSLTQTSLIMTIPLCGHHLNHFFCEMLVLLKLACEDTVGTETYLFWAGAVILVCPVALILGTYAHIAHAVLKIKSRSGRRKALGTCGSHLTVVFLFYGSAMYTYLQPIHTYSGSEGKFAALFYTIITPMLNPLIYTLRNKDVKGALCKVLVKGKKETKTRRKMVE

SEQ ID NO: 1966 - protein, 311 aa, Mus musculus
MGTFNTSLGGGFILVGFSDWPALELIFFIHILIFYSITLFGNTAIIALSRTDLRLHTPMYFFLSHLSFLDLCFTTSTVPQLLINLHGQDRTISYGGCVAQLFIFLALGSTESVLLVVMAFDRYVAVCRPLHYTTIMHPVLCQALAIASWVGGFLNSLIQTGLMMAMPLCGHRLNHFFCEMPVFLKLACQDTGGTEAKMFVARVVIVAVPAMLILGSYAQIARAVLKVKSVAARRKAAGTCGSHLLVVSLFYGSATYTYLQPKDSYSESKGKFVALFYTIITPMFNPLIYTLRNKDMKGALWKVLGRAAATG

SEQ ID NO: 1967 - protein, 311 aa, Mus musculus
MESFNISLGKGFILVGFSDWPALELIFFIYILIFYSLTLFGNTAIIALSRMDLQLHTPMYYFLCHLSFLDLCFTTSTVPQLLINLHGQDRTISYGGCVSQLFITLALGSTESVLLVVMAFDRYAAVCRPLHYMNIMHPVLCQALAIASWVGGFLNSLIQTGLMMAMPLCGHRLNHFFCEMPVFLKLACQDTGGTEAKMFVARAVIVAVPAMLILGSYAQIARAVLKVKSVAARRKAAGTCGSHLLVVSLFYGSATYTYLQPKDSYSESKGKFVALFYTIITPMFNPLIYTLRNKDMKGALWKVLGRAAATG

SEQ ID NO: 1968 - protein, 311 aa, Mus musculus
MEYLNTSSEEGFILVGFSDWPHLEPTLFAFISIFYSLTLFGNTVIIILSRLDLRLHTPMYYFLCHLSFLDLCYTTSTVPQLLVNLSGLDRTISFGRCVAQLCIVLSLGGTECVLLVAMAIDRYAAVCRPLHYTTIMHPVLCRALVVFSWVGGLVNSLIQTSLVMAMPLCGHQLNHFFCELPVLLKMACEDTGGTEVNLFVARVIILVCPLLLILGSYAHIARAVLNIRSMAGRRKAFGTCASHLIVVAMFYGSAISTYLQPVHRYSEKEGKFLALFYTIITPMLNPLIYTLRNKDVKGALWKVLGRGTDSR

SEQ ID NO: 1969 - protein, 311 aa, Mus musculus
MGSFNASLGKGFILVGFSDWPQLELILFIYVLIFYSLTLFGNTTIIALSQLDIRLHTPMYFFLSHLSFLDLCYTTSTVPQLLINIAAQDHTITYGRCVAQLFSVLALGSTESMLLVVMAFDRYAAVCRPLHYTTIMHPLLCQALAISSWVAGLVNSLIQTGLMMAMPLCRYRLNHFFCEMPVFLKLACKDTAGTEAKMFVARAIILVFPATLILGSYAHIARAVLKVKSTSGRRKAFGTCGSHLLVVSMFYGSTIYTYLQPNDSYSENEGKFVALFYTIVTPMLNPLIYTLRNKDVKGALWKVLGRGTDSR

SEQ ID NO: 1970 - protein, 311 aa, Mus musculus
MGTFNFSSDRAFFLVGFSDWPHLELVFFVAISIFYSLTLFGNSSIIALSRLDLRLQTPMYFFLCHLSFLDLCYTTSTVPQLLINLHGQDRTISYERCVAQLLIFLALASTECVLLGVMAFDRYAAVCRPLHYTTIMHPQLCHTLAISSWVGGLVNSLTQTGLMMVMPLCGYRLNHFFCEMPIFLKLACEETKRTEAKMFVARTIVLVCPAALILGSYAHITRAVLKVKSTAGRRKAFGTCGSHILVVSLFYGSAIYTYLQPTHTYSESEGKFVALFYTIITPMLNPLIYTLRNKDVKGALWKVLGRGTDSE

SEQ ID NO: 1971 - protein, 313 aa, Mus musculus
MMQWNNWTRNSDFILLGFFDHSPLHTFFFSLILAIFFMALIGNSVMVILIYLDAQLHTPMYILLSQLSLMDLMLISTTVPQTAFNFLSGNKSISMAGCGVQIFFYVSLLGAECFLLAAMAYDRYVAICYPLRYPILMSHKICSLMAAFSWILGSLDGIIDVAAVLSFSYCGTREIPHFFCDIPALLTISCSDTLIFEKIIFFCCVIMLIFPVVIVIASYICVILAVIKMASAESRHKAFATCSSHVMVVVIYYGAAMFIYMQPSSSRSPNQDKLVSAFYTILTPLLNPLIYSLRNKEVARAFMKVLRMDKAAG

SEQ ID NO: 1972 - protein, 320 aa, Mus musculus
MQISSSIISPRMNCSQAPGFILLGLPREPEKWQHFFIIFLGLYLLGLLGNLLLLLAIGSDVHLHTPMYFFLSQLSLVDLCFITTTAPKTLETWWTGDGSISFSGCLTQLYFFGVFADMDNLLLAVMAIDRYAAICHPLLYPLLMTPCRCEVLVSGSWGIAHCVSLMYTLLLSQLYFHTNQEIPHFFCDCRPLLLLSCSDTHLNEVLMMALAGVLGVSAVLCIVSSYGCIFYAVARVPSAQGKRKALTTCSSHLSVVLLFYSTVFATYLKPPSTSHSSGEVVAAVMYTLVTPTLNPFIYSLRNKDVKSSLRRVLNIEKSQD

SEQ ID NO: 1973 - protein, 321 aa, Mus musculus
MWIHLEFMENHKNVTEFIFMGLWQNRQIELLFFLLFLLCYLAILMGNSVILFTITYSHLIEQPMYYFLCHLSLMDLCYTSTVIPRLVRDLATTRKNISYNECMTQLFTAHLLAGVEIFILVSMALDRYVAIVKPLHYMVIMSRKRCDMLIVTAWILGFWHSIALLLMVLSLPFCGPNHINHYLCDIKPLLKLVCKDVHVVSILAIANSGMVLFAIFIVLLASYILILYSLRTRSSAGKRKALSTCSSHIMVVVLFFGPCIYIYILPAGSENKDKEISVFYTVIAPMLNPLIYTLRNSEMKSAMHKVWSRLSLRVEVSERIL

SEQ ID NO: 1974 - protein, 309 aa, Mus musculus
MEIKNNVTEFVLLGLTQNPQLQKILFVVFLVIYVFSVAGNLLILITITNSQLLGYPMYYFLAYLSFIDACYSSVNTPKLLADTFHKRKSIKFNGCMTQVFAEHFIGGTEVILLTVMAYDRYVAICKPLHYATIMNRRLCNILVGVSWVGGFLHGGIQILFIIGLPFCGPNVIDHFMCDLNPLLDLACIDTHILGLFVAANSGFICLLNFLLLLVSYLVILNSLRSHSAEGRRKALSTCVSHITVVVLFFVLCIFVYMRPAATLPIDKAVALFYTMITPMLNPLIYTLRNAQMKNAIWKLFSVKVQSDDK

SEQ ID NO: 1975 - protein, 309 aa, Mus musculus
MEIKNNVTEFVLLGLTQNLHLQKIVFVVFLVIYVFSVVGNLLIVITITNSQLLGYPMYYFLAYLSFIDACYSSVNTPKVIADSLHKRKSIKFNGCMTQVFAEHFIGGTEVILLTVMAYDRYVAICKPLHYATIMNRQLCNILVGVSWVGGFLHGGIQILFIIGLPFCGPNVIDHFMCDLNPLLDLACIDTHILGLFVAANSGFICLLNFLLLLVSYLVILNSLRSHSAEGRRKALSTCVSHITVVVLFFVPCIFVYMRPVATLPIDKAVTLFYTMITPMLNPLIYTLRNAQMKNAIWKLFSVKVQSDDK

SEQ ID NO: 1976 - protein, 310 aa, Mus musculus
MWLNNNVTEFILLGLTQDPFRKKILFVVFLLFYMGTLLGNLLIIATIKTSQTLGSPMYFFLFYLSLSDTCFSTTIAPRTIVDSLLNEASISFTECIIQVFTFHFFGCLEIFILILMAVDRYVAICKPLHYMTIMSRRVCGVLVAIAWVGSCVHSLVQIFLALSLPFCGPNEIDHYFCDLQPLLKLACSDTYLINLLLVSNSGAICTVSFLMLIVSYVIILRSLRNHSAEGRRKALSTCISHIIVVILFFGPCIFIYTRPATTFPMDKMIAIFYSIGTPLLNPLIYTLRNAEVKNAMKKLWRKKVVSDDRK

SEQ ID NO: 1977 - protein, 318 aa, Mus musculus
MASRTYSMEEVNNVTEFIFLGLSQNPEVEKVCFVVFSFFYMVILLGNLLIMLTVCSGNLFKFPMYFFLNFLSFVDICYSSVTAPKMIIDLLVKKKTISYVGCMLQLFVVHFFGCTEIFILTVMAYDRYVAICKPLHYMTIMDRERCNKMLLGTWIGGFLHSIIQVALVVQLPFCGPNEIDHYFCDVHPVLKLACTDTYIVGIFVTANSGTIALGSFVILLISYTVILMSLRKQSSEGRRKALSTCGSHIAVVIIFFGPCTFMYMRPDTTFSEDKMVATFYTIITPMLNPLIYTLRNAEVKNAMRKLWARKFSWETTGK

SEQ ID NO: 1978 - protein, 312 aa, Mus musculus
MQNQTIVTEFVLLGLSQNPKVEKLLFVIFLLLYLATIGGNMTIVVTIASSPVLLGSPMYFFLAFLSLLDACVSSIVTPKMIIDLFYKRKTISFECCMMQVFSVHFFSAVEVIILAAMAYDRYVAICKPLHYSSIMNRRLCGILVGIAFAGGFLHSIIQIIFTLQLPFCGPNFIDHFICDLFPLLKLACTDTHIFVILVFANSGSICIIIFSFLLVSYVVILFSLRTHSSEGRRKALSTCGSHITVVVLFFVPCILIYARPTSPFSLEKNVFIFADVLTPLLNPVVYTFRNKEMKNAIRKMWRSLLVAPDILK

SEQ ID NO: 1979 - protein, 310 aa, Mus musculus
MQLNINVTEVILLGLTQDPSRKNIVFAIFLLFYMGTLLGNLLIIVTVKTSQALGSPMYFFLFYLSLSDTCFSTTVAPRTIVDSLQKEASISFTECIIQIFTFHFFGCLEIFILILMAVDRYVAICKPLHYMTIMSRRVCGVLVAIAWMGSCVHSLVQIFLALSLPFCGPNVIDHYFCDLQPLLKLACSDTYLINLLLVSNSGAICTVSFLVLMFSYVIILHSLRNHSAEGRRKALSTCISHIIVVILFFGPCIFIYTRPATTFPMDKMISIFYSIGTPLLNPLIYTLRNAEVKNAMKKLWRKKIVSDDKK

SEQ ID NO: 1980 - protein, 308 aa, Mus musculus
MAWSNHSVITEFVLTGLSDDPLIPALLFALFLGIYVLTMTGNLTMLLVITADSHLHTPMYFFLSNLSFVDLCFSSVTVPKLLKDLLSAKKTISIEGCLAQVFFVFFSSGTEACLLSVMAYDRYAAICHPLLYGQVMRNELCVRLVVISWGVASLNATIIVLLAVNLDFCGAQTIHHYTCELPALFPLSCSDISITVVVLLCSSLLHGLGTFIPIFFSYARIVSAILSISSTTGRSKAFSTCSSHLAAVTLFFGSGFLCYLMPPSGSSLDLLLSLQYSAVTPMLNPLIYSLKNQEVKAAVQRTLRKYLL

SEQ ID NO: 1981 - protein, 306 aa, Mus musculus
MVNQSSPVVFFMLGFSEHPQLEKVLFVVVLCSYLLTLLGNTLILLLSTLDPRLHSPMYFFLSNLSFLDLCFTTTCVPQMLFNLWGPAKTISFLGCFVQLFIFMSLGTTECILLTVMAFDRYVAVCQPLHYATKINPHLCRQLAGIAWAIGLVQSIVQTPPTLKLPFCSYRQIDNFLCEVPSLIQLSCGDTTYNEIQMAVASIFIVVVPLSLILVSYGAIARAVLKISSAKGRRKAFGTCSSHLIVVTLFYSSVIAVYLQPKNPYARERGKFFGLFYAVGTPTLNPLVYTLRNKGGKKSILEAAKER

SEQ ID NO: 1982 - protein, 314 aa, Mus musculus
MGQRSNVTEFILLGLTQDHVGQRALFVMFLLIYIVTIVGNLLIVGTVIASPSLGTPMYFFLAYLSLLDAVYSTAISPKLMVDLLCDRKTISFSACMTQLFLEHLLGGAEVFLLMVMAYDRYVAICKPLHYLIIMNRRVCFLLLVVSWAGGLAHSVAQLLFVYNLPFCGPNVIDHFICDMYPLLGLACTDTHIIGLTVVANGGAICMLVFIILIISYGIILRSLKTHSQEGRQKALSTCSSHIMVVVLFFVPCIFMYVRPVHNFPIDKSITVFYTIVTPILNPLIYALRNSEMKRSMENLLYKVFPRDKITMSFH

SEQ ID NO: 1983 - protein, 313 aa, Mus musculus
MELHSPPSNVTEFVLLGLTQNPRLQKILFIVFLFVFLFTVLANLLIVLTISFSPTLSAPMYFFLTYLSFIDAFYTSVTTPKMIIDLLYQRRTISLAGCLTQLFVEHFLGGSEIILLIVMAYDRYVAICKPLHYMTIMRQGLCRLLVVVAWIGGILHATMQIFFMINLPFCGPNVIDHFMCDLFPLLKLACRDTHKLGIIVAANSGAMCFLIFTMLLISYIVILRSLKSHSSEGRRKALSTCGSHFTVVVLFFVPCIFTYMRPVTTYPVDKLVTVFFAILTPMLNPIIYTARNTEVKNAMRNLLKRQVTYPVLK

SEQ ID NO: 1984 - protein, 316 aa, Mus musculus
MEPWNSTLGSGFILVGILDGSGSPELLCATIAALYMLALISNGMLILVITMDIYLHVPMYLLLEQLSLMDLLLASVISPKAVMDFLLKDNTITFGGCALQMFLELALGSAEDLLLAFMAYDRYVAICHPLNYMIFMRPSICWLMVAISWIPASLSALGYTIYTMQYPFCKSREIRHLFCEIPPLLKLACADTSRYQLMVYLMGVTLLIPPLAAILASYSLILFTVLKMPSNEGRKKALVTCSSHLTVVGMYYGPLTVMYILPSSYHSSKQENILSFLYTIVTPALNPLIYSLRNKEVSGALKRVLGKRLLSTHPNF

SEQ ID NO: 1985 - protein, 315 aa, Mus musculus
MEVCNSTLGSGFILVGILDDSGFPELLCATITALYFLAITSNGLLLLVITMDARLHVPMYLLLWQLSLMDLLLTSVITPKAILDYLLKDNTISFGGCALQMFLELTLGSAEDLLLAFMAYDRYVAICHPLNYTILMSQKVCCLMIATSWILASLSALGYSIYTMQYPFCKSRQIRHLFCEIPPLLKLACADTSTYELMVYVMGVTLLIPPLAAILASYSLILFTVLHMPSNEGRKKALVTCSSHLTVVGMWYGGAIVMYVLPSSFHSPKQDNISSVFYTIFTPALNPLIYSLRNKEVTGALRRVLGKRFSVQSTF

SEQ ID NO: 1986 - protein, 315 aa, Mus musculus
MLMIQWNNWTRNSDFILLGLFDHSPLHTFFFSLILGIFFMAFIGNSIMVILIYLDAHLHTPMYILLSQLSLMDLMLICTTVPQMAFNFLSGNKSISMVGCGIQIFFYVSLLGAECFLLAAMAYDRYVAICYPLRYPILMSDKICGLMAASSWVLGSLDGIIEVAAALSFSYCGAREIPHFFCDVPALLTLSCSNTLIFERIIFFCCVIMLTLPVAIIIASYTRVILTVLHMSSAESRHKAFATCSSHLMVVGMYYGAAMFIYMRPSSGRSPTQDKIVSAFYTILTPMLNPLIYSLRNKEVARAFMKVLGIDKAAA

SEQ ID NO: 1987 - protein, 312 aa, Mus musculus
MEGTNRSVVSEFMFVGLTNSWKMQVLLFVFASVFYMASMMGNSLIIFTVASDPHLHSPMYFLLANLSFIDLGVSCVTCPKMIYDLFRKHKVISFRGCITQIFFIHVIGGVEVVLLIGMAYDRYVAICKPLHYLTIMNAKMCIFILVSAWVVGLMHSLVQFVYIVNLPFCGPNILDSFYCDLPRFIRLACVDTNQLELMVSANSGFISVGSFFILVISYIVIIVTVQKHSSSGSSKALSTLSAHISVVVLFFGPLIFVYTWPSPSTHLDKYLAIFDAVGTPFLNPVIYTLRNQDMKTAMKRVCRQLLKYGKIS

SEQ ID NO: 1988 - protein, 312 aa, Mus musculus
MGEANCSVVSEFVFLGLSNSWAIQLFLFFFSCIFYVASLLGNFLIVLTVTSDPQLQSPMYFLLGNLSIIDLIFCSSTTPKMIYDLFRRHKTISFGGCITQIFFIHAVGGTEMVLLIAMAFDRYVAICKPLHYLTIMSPQKCILILVASWIIGFIHSVTQLSFVVDLPFCGPNELDSFFCDLPRFIKLACVDTYTLGFMVTANSGFISVASFLILIISYIFILVTVQKKSLGSLGKALSTLSAHVIVVVLFFGPLIFFYTWPFPTSHLDKFLAIFDAVITPFLNPVIYTLRNKEMKVAMRRLCSQFVNYNKIS

SEQ ID NO: 1989 - protein, 316 aa, Mus musculus
MDGGNHSVVSEFLLLGLTNSWRIQILLFLFFTVFYVASMLGNLLIVLTIISDHHLHSPMYFLLANLSFIDTGVSSIATPKMIYDLFRKHKVISLNGCITQMFFIHTVGGTEMVLLIVMAYDRYIAICKPLHYLTIMSLRMCIVLLALAWIIGLIHSVAQLAFVVNLPFCGANKMDSFYCDFPRFIKLACTDTYRLEFLVTANSGFISMATFFILIVSYIFILVTVRKHSSGASSKALSTLSAHITVVVFFFGPCIIVYVWPFPTLPIDKFLAIFDAIITPSMNPVIYTLRNKEMKVAMRRLFARALSFIDSLRDSN

SEQ ID NO: 1990 - protein, 320 aa, Mus musculus
MMILMSEAMYGMNCSVVSEFVFLGITNIWEVQFLLFFFTLLFYFASMIGNLVIVLTVTLDPHLNSPLYFLLANLSVIDMIFCSITAPKMICDIFKKHKTISFWGCITQIFFSHAVGGTEMVLLIAMAFDRYVAICKPLHYLIIMSPRVCLFFLITSWVIGLIHSVVQLVFVVDLPFCGPNTLDSFYCDLPRLLRLACTNTQELELMVTVNSGLISVGSFLLLVISYIFILFTVWKHSSCGLSKALSTLSAHITVVILFFGPLMFFYTWPSPTSHLDKYLAIFDAFITPFLNPVIYTFRNKDMKVAMGRLWGYLRHYRKMS

SEQ ID NO: 1991 - protein, 310 aa, Mus musculus
MGNGTTVQEFTLEGFPAVQHLGRLLFSLNLLAYLASITGNVVIVSIICTSTRLKSPMYFFLGVFSFGESCFTSAVIPKLLAIFLLGKQTISFVACFIQTFVTLFIGAFGFFLIAVMSVDRCVAICKPLHYPTIMDLRTCILLIMACLALTFTLITWLVVTVSRLSFCGPHVIPHFFCDISPLIHLSCSDTSSAEALTFALALIILFSSLIITTIAYSNIVITIVRLPSAKERQRAFSTCSSHLIVLSLMYGSCVFIYVKPKQMSRLESNREAALVNTVVTPLLNPVIYTLRNKQVHQALRETLSRIKISG

SEQ ID NO: 1992 - protein, 310 aa, Mus musculus
MGQEFINQTWVNEFILLGLSSDRNTQVFLFVLVLAMYVVTVVGNTLILFLIRLDIRLHTPMYFFLSVLSIVDLCYGNSIAPQMLAHLVSAQKLIPFHSCVFQLYISLALGGSEFFLLGAMSYDRYVAVCHPLHYTVIMDGGVCLGLAASCLMAGFFNSLMETVITFRLPLCHNVINHFACETLAVLRLACVDISFNKVMVAISGFLVIMLPCCLVLFSYTRIVIAILRIRSTQGRHKAFGTCASHLTVVCMCFGATIFTYLGPRSASSEDKEKMVALFYAVVAPTLNPVIYSLRNKEVMAALTKLVEKLR

SEQ ID NO: 1993 - protein, 313 aa, Mus musculus
MKRDNATWVSEFILMGLSSDKHIQAGLFVLFGVTYLLTLLGNGLIVLLIALDPRLHLPMYFFLCHLSVVDICYTSSGVPQMLAHFLMEKKTISFALCGTQHFFALALGGTEFLLLAAMAYDRYVAVCNPLRYTVVMNPRLCMGLAGVSWFVGVVNSAVETAVTMRLPTCGHNVLNHVACETLALVRLACVDITLNQVVILASSVVVLLVPCCLVSLSYAYIVTAILKIRSTQGRRKAFGTCASHLTVVSMSYGMALFTHMEPTSTASAEQDKVVVVFYAVVTPMLNPLVYSLRNKDVKAAFSRVLMKIFESKN

SEQ ID NO: 1994 - protein, 312 aa, Mus musculus
MIMNNKTVISQFILLGLPIPQEYQHLYYALFLAMYLTTVLGNLIIIILIILDSHLHTPMYLFLSNLSFSDLCFSSVTMPKLLQNMQSQDTSISYAGCLTQMYFLLVFGDLESILLLVMAYDRYVAVCFPLHYMSIMSPTLCVCLLVLSWVFTVLYSMLHTLLLSRLSFCEDNLIHHFFCDISALLKLACSDIHINELMIFIMGGLVSIIPFLLIVVSYIQIVYSILKISSAHVLHKIFSTCGSHLSVVSLFYGTIFALYLCPSANNSTVKEISMAMMCTVVTPMLNPFIYSLRNRDMRDALFGVLGKKKISL

SEQ ID NO: 1995 - protein, 310 aa, Mus musculus
MRNFSVVTQFILLGIPHTEGVEIMLFVLFLSFYIFTLVGNLLILFAIVSSSRLHTPMYFFLCQLSVCDIFFPSVSSPKMLFYLSGNSRAISYTGCVCQLFFYHFLGCTECFLYTVMAYDRFIAICFPLRYSIIMNHKVCAIMAVGTSFFGCIQATFLTTLTFQLPYCGPNEVDYYFCDIPVMLKLACADTSTLEMVGLISVGLMPLSCFLLILTSYSFILCSILQIRSTEGRHRAFSTCSAHLTAILLAFMPVVLIYLQPTPNPWLNAAVQVLNNLVTPMLNPLIYSLRNKEVKCSLKKMLQQGPILSKK

SEQ ID NO: 1996 - protein, 308 aa, Mus musculus
MGTGNHSVTVVFVLVGLTQQPELLLPLFILFLGIYVVTAVGNLGMILLITVSPLLHTPMYYFLSSLSCVDLCYSTVITPKMLVNFLGKKNLIVYSECMAQLFFFVIFVVAEGYLLTAMAYDRYVAICRPLLYNVIMSSRLCSLLVLVAFILGFVSALAHTSAMMNLSFCKSHVISHYFCDVLPLLNLSCSDIKLNELLLFIIAGFNTLVPTLAVAISYVFIFCSILHIKSSKGRSKAFGTCSSHLMAVGIFFGSITFMYFKPPSSNSLEQEKVSSVFYTTVIPMLNPLIYSLRNKDVKKALGKCLAGR

SEQ ID NO: 1997 - protein, 315 aa, Mus musculus
MQVQMADTNHSTVTEFILAGLTDKPELQLPLFLLFLGIYLLTVLGNLGMIILILLSSHLHTPMYFFLSSLSFIDLCYSTVITPKMLVNFVAKKNVISYEECMTQLYFFLAFVISECHMLAAMAYDRYVAICNPLLYNVTMSYQICSWMVGGVYGMGLIGAAVHTLCMLRVVFCKANIINHYFCDLFPLMELACSSTYVNEVVLLCLSAFNIFIPTLTILGSYIFIIISILRIKSTEGRFKAFSTCSSHFSAVSVFFGSLAFMYLQPFSVSSKDKGKVSSVFYTTIVPMLNPMIYSLRNRDVKLALNKLFQKKFHV

SEQ ID NO: 1998 - protein, 311 aa, Mus musculus
MATGNYCMLPEFILTGLSKKPQLQMPLFLLFLGIYVVTVVGNLGMITLIKLSSHLHTPMYYFLSSLSFIDLCHSTVITPKMLVNFVIEKNIISYTGCMAQLYFFLIFAIAECHMLAAMAYDRYVAICNPLLYNVTMSYQIYTSLIFGVYIIGVVCASAHTGFMIRIQFCNLEVINHYFCDLLPLLELAHSSTYVNELLVLCFGTFNIVVPTMTILTSYIFIIANILRIRSTGGRSKAFSTCSSHILAVAVFFGSAAFMYLQPSSVSSMDQGKVSSVFYTIVVPMLNPLIYSLRNKDVSVALKKILERKLFM

SEQ ID NO: 1999 - protein, 315 aa, Mus musculus
MEEINDTSVAEFILTGLTENPELQLPLFLIFLAVYLVTVVGNLGMIVLILISSQLHTPMYYLLRSLSFIDCCQSTVIIPKMLLNFVTEMNIISYPQCIAQFYFFCAFAVSECHMLAAMAYDRYVAISNPLLYNVTMSYQVCSLMVAVVYGIGLISATAHTVFLLRVLFCKSDIINHYFCDLFPLLELSCSSTYINEVLALSFSAFNIIVPALTILSSYIFIIVSVLHIQSTGGRVKAFRTCSSHIMAVAIFFGSTVFMYLQPSSVSSMDQGKVSSVFYTIVVPMLNPLIYSLRNKDVRVSLKKLLQKISFLKTKN

SEQ ID NO: 2000 - protein, 314 aa, Mus musculus
MEEKNQTVMPEFLFLGITDNFHQKIVIFIIFFFVYLVTLGGNVGMIALIWLDPRLHTPMYFFLSQLSFVDVSSSSSIAPKMLCDIFARNKAISFVGCAAQMWFFGLFVATECFLLAAMAYDRYAAICKPLLYTLIMSPHLSVLLVIGPYAIALISTTTHTTLTFCLPFCGPYIINHFFCDISPLLSLACSDTHINKLVLFVLAGTVGVLSGLIILVSYVCILKAILKIQTANGRQKAFSTCSSHLATVSILYGTLFFIYVRPNVSSSLNINKVISLFYTMVIPMLNPLIYSLRNQEVKNAFRRTLEKKHFLTGA

SEQ ID NO: 2001 - protein, 314 aa, Mus musculus
MEEKNQTIVMEFFFLGLTDHLYQKIALFITILFVYLVTLGGNLGMITLIWADPRLHTPMYFFLSHLSFVDMCSSSSIAPKMLCDIFAEEKRISFMGCAAQMWFFGFFVGTECFLLASMAYDRYTAICKPLLYTLLMSQRVCVHLVVGPYVFAIINITTHTTLAFCLPFCGSNTINHFFCDVSPLLSLACADSWVNKVVLFVLSGAIGVFSGLIIIVSYVSILMTIFKIQTADGKQKAFSTCSSHLAAVSILYGTLFFIYVRPSASFSLNINKMISLFYTVVIPMLNPLIYSLRNKEVKGAFRRKVQKKHFPAGR

SEQ ID NO: 2002 - protein, 314 aa, Mus musculus
MIQYNETEVKGFYLLGFGVQHDIQCFLFIVFLIIYMTSMVGNTGMILLIHTDSRLQTPMYFFLQHLAFVDICYTSAITPKMLQTFVVEDRYISFGGCVVQLLIYAIFATCDCYLLAAMAVDRYVAICKPLRYPILMSRKVCIQMVAGSYLIGSINSSVHTGFTFSLSYCKSNHINHFFCDVPPIISLSCSNIETNIKILVIFVGFNLIFTVLVVIFSYMYIMAAILKMSSTAGRKKTFSTCASHLTAVTIFYGTLAYMYLQPHSDNSEENMKVASVFYGIVIPMLNPLIYSLRNKEVKDAIKLTKKKLFRFDTQ

SEQ ID NO: 2003 - protein, 315 aa, Mus musculus
MIQRNTTEVTDFYLLGFGVQKNTQSILFVVFLVVYVTSMVGNTGMILLINTNSRLQTPMYFFLQNLAFVDICYTSAITPKMLQNFMVEDSSISYTGCVIQLLVYATFATSDCYLLAVMAVDRYVAICKPLRYPIIMSRQVCVQLVAFSYLMGSINSSVHTGFTFSLSYCNSKNINHFFCDVVPIISLSCSNIDINIMLLVIFVGFNLTFTVLVIIFSYIYIMAAILKMSSTAGRKKTFSTCASHLTAVTIFYGTLAYMYLQPHSDNSEENMKVASVFYGIVIPMLNPLIYSLRNKEVKEGFKAMSRRFLRLKSNP

SEQ ID NO: 2004 - protein, 314 aa, Mus musculus
MTQGNGTEVTDFYLLGFGVERDIQCVLFIVFLVIYVTSMVGNTGMILLINTDSRLQTPMYFFLQHLAFVDICYTSAITPKMLQNFMVEDKSITFKGCVIQLFIYAVFATSDCYLLAVMAVDRYVAICKPLRYPIIMSRQVCVQLVAVSYLMGSINSSVHTGFTFSLSFCASKINHFFCDIPPIVTLSCYNNDINFMLILIFVGFNLTFTVSVVILSYIYIMAAILKMSSTAGRKKTFSTCASHLTAVTIFYGTLAYMYLQPPSDNSEENMKVASVFYGIVIPMLNPLIYSLRNKEVKDAIKATGKKFLKLDLNY

SEQ ID NO: 2005 - protein, 313 aa, Mus musculus
MERINYTVLTEFILTGVPHPPRLRTFLFVFFLLIYILTQLGNALILITVCADTQLHARPMYIFLGALSVIDMGISTIIVPRLMMNFTPGIKPIPFGGCVAQLYFYHFLGSSQCFLYTTMAYDRYLAICQPLRYPVLMSAKLSILLVAGAWVAGSIHGAIQAILTFRLPYCGPNQVDYFFCDIPAVLKLACADTTVNELVTFVDIGVVVASCFSLILLSYIYIIRAILRIRTADGRRRAFSTCGAHVTIVTVYYVPCAFIYLRPDSHSILDGAAALFPTAITPFLNPLIYTLRNQEVKLALRRMVGSQSTKSEV

SEQ ID NO: 2006 - protein, 318 aa, Mus musculus
MRRTRNTSLDAVVTDFLLLGLAHPPNLRAFLFLVFFLIYILTQLGNLLILLTVWADPKLHARPMYILLGVLSFLDMWLSSVIVPRLILNFTPASKAIPFGGCVAQLYFFHFLGSTQCFLYTLMAYDRYLAICQPLRYPVLMNGKLCTILVSGAWVAGSIHGSIQTTLTFRLPYCGPNQIDYFICDIPAVLRLACADTTVNELVTFVDIGVVAASCFMLILLSYANIVHAILKIRTADGRKRAFSTCGSHLTVVTVYYVPCIFIYLRAGSKSPFDGAVAVFYTVVTPLLNPLIYTLRNQEVKSALKRLTAGRRDVGGEK

SEQ ID NO: 2007 - protein, 311 aa, Mus musculus
MKTLSSPSNSSTITGFILLGFPCPREGQILLFVTFFIVYILILMGNASIICAVYCDQRLHTPMYFLLANFSFLEIWYVTSTVPNMLANFLSDTKVISFSGCFLQFYFFFSFGSTECFFLAVMAFDRYLAICRPLHYPSLMTGHLCNILVISCWVLGFLWFPVPIIIISQMSFCGSRIIDHFLCDPGPLLALACSRAPLMEVFWTIIMSMLLVIPFLFIMGTYILVLRAVFRLPSRDGQKKAFSTCGSHLTVVSLFYCSVMKMYLSPTSEHEAGMQKLVTLFYSVGTPLLNPVIYSLRNKDMKNALQKILRT

SEQ ID NO: 2008 - protein, 319 aa, Mus musculus
MQVTTERQNVSFPDTFVLVGFSDHPWLEMPLFGVLLISYIFTMIGNSSIIVLSLVEPRLQTPMYFFLDNLSLLDLCVTCTIVPQLLVNLWGPEKTIASWSCIAQAYLFHWTSCTESALLAVMAFDRYVAICCPLRYVLIMHLWACVWLAAVCWASGLANSLVQATLTLYLTLCAKNTLDHFFCEVPALIKLACSDTTTNDLSLALGAIPFGIVSPLTVLISYIFIARAVLKLPSAEGRRKALSTCTSHLLVVTMYFGPGMYTYLQPPGNNTQSEFLSLFYCVFTPLLNPLIYTLRNKDVKEAWKKVLTSQSKGISLKGQ

SEQ ID NO: 2009 - protein, 311 aa, Mus musculus
MERTNVSHEMEFELLGLTSDPQLQKLLFVVFLVMYAITVLGNLVMFFLIHVSTTLHTPMYSLLKSLSLLDFCYSSTVVPQTLINFLVERKVISYFGCMAQMFFFAGFATSECYLIAAMAYDRYVAVCSPLLYPTIVSPNVCASLIGGSYGAGFLNSLIHTSCIFSLNFCGAHVVTHFFCDGPPILSLSCVDTSLCEILLFIFAGFNLLSCTLTILISYLLIFIAILQIRSNQGRFKAFSTCSSHLTAVCFFFGTTLFMYLRPKSSYSLTQDRTVAVIYTAVIPMLNPLIYSLRNKDVKEALRKVWGWKSMG

SEQ ID NO: 2010 - protein, 315 aa, Mus musculus
MTDTITNTTEYMEFLLMGYPDEQVLQTLCATLFFLIYLGALVGNFLIITITTIDQHLQSPMYFFLKNLSLIDICYISVTVPKSIMNSVTNTHSISFLGCVLQVFCVIFLAGTEFALLLVMSYDRYAAICFPLHYEAVMNKDACVQMVAAAWLSGCIYGSVHATGTFSVHFCGPNVVYQFFCDIPSLLRLACFGDQILEYVFIITSCCFAFMCFILMVISYVHIFTIILRIPSIQGRFKIFSTCIPHLTVVTLFLSSGFVAYLGSAVKSPSSLNLFMSVFYSLLPPSLNPVIYSFRNSDVKVALHNIFGEKMTTHF

SEQ ID NO: 2011 - protein, 314 aa, Mus musculus
MAFLEDANHTAVTEFILLGLTDDPVLKVVLFSIILCIYLVTVSGNLSTILLIRVSSQLHHPMYFFLSHLASVDVGYSSTVTPKMLANFLVERSTISYLGCTIQLFSGAFFGTLECFLLATMAYDRFIAICNPLLYSTKMSTQVCIQLLVGSYIGGFLNASSFLLSFFPLLFCGPNRVNHFFCDLAPLIELSCSGSNVPIVPASFCSAFVIIVTVFVIAISYTYILITILKMRSTEGRQKAFSTCTSHLTAVTLFYGTITFIYVMPKSSFSTDQNKVVSVFYMVVIPMLNPLIYSLRNNEIKGALKRQLARKIFS

SEQ ID NO: 2012 - protein, 314 aa, Mus musculus
MAFLEDGNHTAVTEFVLFGLTDDPVLRVILFIIFLCIYLVNVSGNLSTILLIRVSSQLHHPMYFFLSHLASVDVGYSSTVTPKMLANFLLERSTISYLGCTIQLFSGAFVGTLECFLLATMAYDRFIAICNPLLYSTKMSTQVCIQLLVGSYIGGFLNASSFLLSFFPLLFCGPNRVNHYSCDLTPLIELSCSGSNVPIVPASFCSAFVIIVTVSVIAISYTYILITILKMRSTEGRQKAFSTCTSHLTAVTLYYGTVTFIYVMPKSSYSTDQNKVVSVFYTVVIPMLNPIIYSLRNNEIKGALKRQLARKIFS

SEQ ID NO: 2013 - protein, 314 aa, Mus musculus
MMLGRMAFSNDSSVKEFILLGLTQQPELQMPLFFLFLGIYVVSMVGNLGLIVLIVLNPHLHTPMYYFLFNLSFIDLCYSSVITPRMLVGFVKQNIISHAECMTQLFFFCFFVIDECYILTAMAYDRYAAICKPLLYQVTMSHQVCHLMMVGVYVMGLVGAMAHTGSMLSLTFCDGNIINHYMCDIPPLQKLSCTSTSINELVVFIVVGVNVIIPSLTVFISYTLILSNILSIQSAEGRSKAFSTCGSHVIAVSLFFGASAFMYLKPSSASVDDDKISTIFYTIVGPMLNPFIYSLRNKDVHIALRKTLKKSMFI

SEQ ID NO: 2014 - protein, 309 aa, Mus musculus
MGFGNDSSVKEFILLGLTQQPELQLPLFFLFLGIYVVSIVGNLGLIVLIVLNPHLHTPMYYFLFNLSFVDFCYSSVITPKMLVSFVTQNIISHAECMTQLFFFAFFVIDECYILTAMAYDRYAAICKPLLYQVTMSHQVCHFMMMGVVVMGSVGAVAHIICMLRLTFCDGNIINHYMCDIPPLLKLSCTSTYINELVVFIIVGFNVTVPILTIFISYTLILSNILSIHSAEGRSKAFSTCGSHVIAVSIFFGSLAFMYLKPSSASVDDDKISTIFYTIVGPMLNPFIYSLRNKDVHIAMRKTLKKGMFA

SEQ ID NO: 2015 - protein, 309 aa, Mus musculus
MVLENSSSVKEFILLGLTQQPELQMPLFFLFLGIYIVSMVGNLGLTVLIVLNPHLHNPMYYFLFNLSFTDLCYSTVITPRMLVGFVKQNTISHAECMTQHFFFCFFVIDECYILTAVAYDRYAAICKPLLYQVTMSHQVCLLMTVGVYVMGFLEAIAHTGSMVSLTFCDGNIINHYACDILPLLKLSCTSTTINELVVFIVVGVNVIVPTLTIFISYTLILSNILSIHSAEGRSKAFSTCGSHVIAVSLFFGAAAFMYLKPSSASEDDDKVSTIFYTIVGPMLNPFIYSLRNKDVYLALRKTLMKRSFT

SEQ ID NO: 2016 - protein, 314 aa, Mus musculus
MNWGRMALGNDSSVKEFILLGLTQQPELQLPLFFFFLGVYIFSVVGNLGLIVLIVLNPHLQTPMYYFLFNLSFTDLCYSSVITPKMLVSFVKQNIISHAECMTQLFFFCFFVIDECYILTAMAYDRYAAICKPLLYQVTMSHRVCLLMTVGVYVMGFVEAMAHTASMVHLIFCDSNIINHYMCEINALLKLSCTSTSINELVVYIVVGFNVIVPTLTIFITYTLILFNILSIHSAEGRSKAFSTCGSHMIAVSLFFGAAAFMYLKPSSASEDEDKVSTIFYTIMGPMLNPFIYSIRNKDVHIALKKTLKRSIFI

SEQ ID NO: 2017 - protein, 311 aa, Mus musculus
MAAANTSSVAEFILVGLTDQPQLQIPLFFLFLGFYIVTMVGNLGLITLIGLNSHLHIPMYFFLFNLSFIDFSYSTTLTPKMLVGFVLRKNIISYAGCMTQFFFFCFFVFSESYILSAMAYDRYVAICKPLLYSVTMSPQVCSYLLSGVYGMGVFGAVAHMGNLQFISFCADNIINHYMCDIIPLLELSCNSSYINLLVVFIVVTIGIGVPIVTIFISYGFILSSILHISSKEGRSKAFSTCTSHIIVVSLFFGSGAFMYLKPPSSLPLDQGKVSSVFYTAVVPMFNPLIYSLRNKDVKIALKKTLSRKNFS

SEQ ID NO: 2018 - protein, 315 aa, Mus musculus
MDVYNLTTVTQFILIGLSDLPEVRYPLFVAFVIIYQITLLGNGLILLAIVTEKKLQTPMYYLLANLSLLDIFCPSATVPKMLKNLLTEDHSISFVGCALQLYFLVALAGTEVFLLAVMAYDRYVAICFPLRYSLIMTKVRCVQLLFGTWAAGFLNSFVHTMSTFSLSFCKSNRVNQYYCDIPPVVALSCSSTYMAEMLVLVIGGICGVGAFLITLISYIYIVSTILKIRSAEGKRKAFSTCASHLLVVFLFYGTTIFTYIRPTSSQHSPGRDRLISMLYGVITPMLNPIIYSLRNTEVKGALRKVLHLRICSQRE

SEQ ID NO: 2019 - protein, 317 aa, Mus musculus
MEMDVYNLTTVTQFILIGLSDLPEVRYPLFVAFVIIYQITLLGNGLILLAIVTEKKLQTPMYYLLANLSLLDIFCPSATVPKMLKNLLTEDHSISFVGCALQLYFLVALAGTEVFLLAVMAYDRYVAICFPLRYSLIMTKVRCVQLLFGTWAAGFLNSFVHTMSTFSLSFCKSNRVNQYYCDIPPVVALSCSSTYMAEVLLLVIASIFGVGAFLITLISYIYIVSTILKIRSAEGKRKAFSTCASHLLVVFLFYGTTIFTYMRPTSSQHSPGRDRLISMLYGVITPMLNPIIYSLRNTEVKGALRKVLHLRICSQTA

SEQ ID NO: 2020 - protein, 312 aa, Mus musculus
MIGERNITTITQFILLGFSDFPRITVLLFVIFLMIYIMTMTWNLSLIALIRMDSHLHTPMYFFLSNLSFIDLCFVTSTAPKMLSNFFQENQTISFVGCIVQYFILSTMGLTECCLMTAMAYDRYAAICNPLLYSSVMSPTLCAQMVMGSYTAGLTGSVSQICALLQLYFCGPNVIRHFFCDISQLLNLSCSDAFFVQVLLAILTMCFGIANALATMLSYGFIVLSILKITSAKGRSKAFNTCASHLTAVSLFYSTGIFVYLRSSSGSSSSFDRFTSVFYTVVIPMLNPLIYSLRNKEIKDAMKRLQKKKICN

SEQ ID NO: 2021 - protein, 311 aa, Mus musculus
MEPGNLTWVSEFIFLGFSEIWELQVFLFVVFLCVYSTTVVGNLLIIVTVSSDPRLHTPMYFLLRNLAVLDLCFSSVTAPKMLVDFLSEKKTISYRGCMVQIFFFHFLGGAMVFFLSVMAYDRLVAISRPLHYVTIMNSQLCMGLVVASWVGGFAHSIVQLSLMLPLPFCGPNVLDNFYCDVPQVLRLACMDTSLLEFLMISNSGMLDVIWFFLLLISYLVILVMLRSHSGEARRKAASTCTTHIIVVSMIFIPSIYLYARPFTPFTMDKAVSISHTVLTPMLNPMIYTLRNQEMQAAMKRLAKRLALCNRE

SEQ ID NO: 2022 - protein, 313 aa, Mus musculus
METQNITWVSEFILLGFSQTQELQKLLFVVFLCVYITTVVGNILIMITVTFDPRLDMPMYFLLRNLAVIDLSYSTVTSPKMLVDFFHKTKTISYQGCMAQIFFFHLLGGGTVFFLSVMAYDRYIAISRPLHYVTIMNTKLCVGLVVASWVGGFAHSIVQLSLMLPLPFCGPNVLDNFYCDVPQVLRLACTDTSLLEFLMISNSGMLVLIWFLLLLISYTVILVMLRSHSGQARRKAASTCTTHIIVVSMIFIPCIYIYSRPFTPFPLDKAVSISYTVLTPMLNPMIYTLRNQEMQAAMKRLAEHLVLTKRNEL

SEQ ID NO: 2023 - protein, 311 aa, Mus musculus
MQPGNLTWVSEFVFLGFSEIWELQVFLFVVFLCVYSTTVVGNLLIIVTVSSDPRLHTPMYFLLRNLAVLDLCFSSVTAPKMLVDFLSEKKTISYQGCMAQVFFFHFLGGAMVFFLSVMAYDRLVAISRPLHYVTIMNTQHCVVLVVTAWVVGFVHSIVQLSLMLPLPFCGPNVLDNFYCDVPQVLRLACTDTSLLEFLMISNSGMLDVIWFFLLLISYLVILVMLRSHSGEARRKVASTCTTHIIVVSMIFIPSIYLYARPFTPFTMDKAVSISHTVMTPMLNPMIYTLRNQEMQAALKRLGMHLLVCRKE

SEQ ID NO: 2024 - protein, 309 aa, Mus musculus
MEIINKTAKVQFFFRPFSPDPGVQMVIFVTFLVMYLTSLSGNATIAVIVHINHSLHTPMYFFLANLAVLEIFYTSSIAPLALANLLSMGKTPVSITGCGTQMFFFVFLGGADCVLLAVMAYDRFVAICYPLRYTLIMSWSLCVEMMVGSLVLGFLLSLPLTILIFHLPFCHNNEIYHFYCDMPAVIRLACGDTHVHRTALYIISFIVLSIPLTLISISYVFIITAILRIRSAEGRHRAFSTCSSHIVVVLLQYGCTSFIYLSPSSSYSPEMGRMVSVVYTFITPILNPLIYSMRNKELKDALRKALRKF

SEQ ID NO: 2025 - protein, 313 aa, Mus musculus
MDKHNLTVVTEFILMGITENPELQAPLFGLFLVIYLTSVIGNLGIIILTNVDAKLQTPMYFFLRHLAFTDFVYSTTVGPKMLVNFVVDQNAISYSLCATQLAFFLLFIGSDLFILSAMSYDRYVAICKPLLYTVIMSHKVCWVLVTMTYLYCTFMSLVVTINIFSLSFCGYNVINHFFCDCIPLISLLCSNTQEVELIVMIFAAFDLISSLVVVLMSYLLILIAVLRMNSAEGRRKAFSTCGSHLTVVTVFYGTLIFMYVQPESSHSIDTDKISSIFYTLIIPLLNPLIYSLRNKDVKEALQRTWQKIFNTFS

SEQ ID NO: 2026 - protein, 313 aa, Mus musculus
MENQNRTVVTEFILMGITDHPELQSSLFGLFLLIYLISLVGNLGMIVLTMVDSRLQTPMYFFLRHLATTDLGYSTTVGPKMLTNFIVDQNRISFNLCATQLAFFLLFIACELFILSAMSYDRYVAICKPLFYMVIMSKRLCWVLVVIPYVYCTIVALLITIKIFTLSFCGSNVISHFYCDSLPLLSLVCSNTQEIEVIMLFLSAFNLISSLLLVLVSYLLILIAILRMNSAEGRRKAFSTCGSHLTVDTVFYGTLIFMYMQPKSSHSFDTDKLASVFYTLIIPMLNPLIYSLRNKDVKDALHRTGKKLHSVCF

SEQ ID NO: 2027 - protein, 315 aa, Mus musculus
MQMESQNLTVVTEFILRGITDRPELQVPLFGLFFMIYLISLFGNLGMIILTIVESRLQTPMYFFLRHLAITDLGYSTAIGPKMLANFVVSKNTISFHLCATQLAFFLLFIACELFILSVMSYDRYVAICNPLLYNVIMSQTVCWVLVAIPYLYSVFISLIVTINIFSSSFCGYNVIPHFYCDGLPLISLLCTNTDKIGLIILILSAINLISSLLIILGSYLLIFRAILRMNSAEGRRKAFSTCGSHLTVVSVFYGTLIFMYVQPKTSHSFDTDKVASIFYTLVIPMLNPLIYSLRNKDVKYALRKTGKIIQNNFS

SEQ ID NO: 2028 - protein, 313 aa, Mus musculus
MENHNLTMVTEFILVGITDRPELQAPLFGLFLIIYLITLVGNLGMIILTMVDSRLQTPMYFFLRHLATTDLGYSTAVGPKMLRNFLVEQNTISIYFCAVQLSFFSMFIVSEFFILSAMSYDRYVAICKPLLYNVIMSQRVCWLLVAIPYLYSIFVALIVTINIFSSSFCGHNIISHFYCDGLPLISLLCSNKKESEMIILILSTINLISSPVVILVSYLLILRAILKMNSAEGRQKAFSTCGSHLTVVTVFYGTLIFMYVQPKSNHTLNTDKVASIFYTLIIPMLNPLIYSLRNKDVKYALRKTGKSIQNIFS

SEQ ID NO: 2029 - protein, 313 aa, Mus musculus
MKKQNFTMVTEFILVGITDRPELQAPLFGLFLIIYLITLVGNLGMIILTMVDSRLQTPMYFFLRHLATTDLGYSTAVGPKMLRNFLVEQNTISFYICAVQLTFFNMFIVSEFFILSAMSYDRYVAICKPLLYNVIMSQRVCWVLVAIPYIYSIFVALLISINIFSSSFCGHNIISHFYCDGLPLISLLCSYRKENEMITFILSIINLITSPLVILASYLLILRAILRMNSAEGRQKAFSTCGSHLTVVTVFYGTLIFMYVQPKSSDSLKTDKVASIFYALIIPMLNPLIYSLRNKDVKSALRKTGKTIQNIFS

SEQ ID NO: 2030 - protein, 298 aa, Mus musculus
MGLSNSRELQIFLFAFFFVFYVGIVFGNLLIVITVTNDSHLHSPMYFLLANLSFIDLCVSSVTAPKTIADFFYKRKVISVKGCFTQIFLLHFFGGSEMVTLVAMAFDRYVAICKPLSYTTVMRGNVCVSIVATAWAIGFLHSVSQLAFAISLPFCGPNRVDSFYCDLPRVIKLACAETYRLDIMVIANSGVLSVCSFVLLIISYGIILMTIQRRPSDRSSKALSTLTAHITVVLLFFGPCIFIYAWPFPIKSLDKFLAVFYSVVTPLLNPIIYTLRNTEMKTAMRRLRQWNLSFWVKS

SEQ ID NO: 2031 - protein, 312 aa, Mus musculus
MDGGNRSVVSEFILQGLSHSKNIQVLLFVIFLMLYLFIVSGNIVILTLITTDPHLHSPMYFLLANLSFVDMCLSSNITPKMITDFLRENKTISFAGCMSQVFFTHCIAGGEMILLVVMAYDRYVAICKPLHYFTIMNLKRCTGLVLTSWTIGFIHGISYLVVFVHLPFCGPKEIDSFFCDMPLIIKLACMDSHNLNTLMNAECGVVVVTCFSLLLISYTYILVTVSKSSKAGASKALSTCSAHITVVMIFFVPCIFIYVWPLSITWFDKFLAVFYSVITPLLNPTIYTLRNKEIKNAMKRFIGKFLGPKRNS

SEQ ID NO: 2032 - protein, 312 aa, Mus musculus
MDGENHTVVSAFVFLGLTHSWEIQLLLLVLSSVLYILSMAGNILIVFSVTIDPHLHSPMYFLLACLSFIDLVACSVTSPKMVYDLFRKHKVISFGGCITQIFFIHLVGGVEMVLLVAMAFDRYIAICKPLHYLTIMSPRVCVLFLGAAWGLGISHSLFQLAFLIDLPFCGPNTLDSFYCDLPKLLRLACRDTYKLQFMVTINSGFICVGSFLLLLISYIFILFSVWKHSSGGSSKALSTLSAHITVVFLFFGPTLFIYTWPHPNSQIDKFLALFDAVLTPFLNPVIYTFRNKEMKVAIRRVFKTLLTFRGIS

SEQ ID NO: 2033 - protein, 312 aa, Mus musculus
MIRANHSAVSEFVLLGLSNSWEIQVFIFFFTCLFYVSSLTGNFIIVVTVTSDPYLHSPMYFLLANLSVIDLIFCSIAAPKMICDLFRKQKVISFGGCISQIFFSHAVGGTEMVLLIAMAFDRYVAICKPLRYLTIMSPRMCLLILVAAWIIGLIHSSAQLAFVINLPFCGPNILDSFYCDIPRLVKLACTDTYKLELMITANSGFISLIAFFLLIISYVFLLTTVQKQSSGCSSKALSTLLAHITVVVLFFGPLIFFYVCPSPSTHVDKFLAIFDAVLTPFLNPIIYTLRNRDMKIAIRKVFCQCLAFRKSM

SEQ ID NO: 2034 - protein, 321 aa, Mus musculus
MYFPQLSDPMDQVNASALPEFVLLGLAQSFGTQIFFGLFFSLFYVGILFGNLFIVFIVIVDSHLHFPMYILLANLSLIDLGLSSTTIPRTISDLFTGCKVISFHSCMTQMFFIHVMGGVEMVLLIAMAYDRYIAICKPLHYLMIMNPKKCIILVIAAWVIGMIHAVSQFLFVVNLPFCGPYNVGSFYCDFPRVIKLACMDTYKLEFVVSANSGFISMCTFFFLITSYIFILASVRQHSSTDLSKAFVTLSAHITVVVLFFIPCMFLYVWPFPTKSLDNFFAIVDFVLTPVLNPTIYTLRNKDMRLAIRRLSRQVLSSREFI

SEQ ID NO: 2035 - protein, 311 aa, Mus musculus
MDPSNYSTLHVFILLGFSDHPHLEMILSGVVTFFYIITLVGNTAIILASLLDPHLHTPMYFFLRNLSFLDLCYTTSIVPQMLVNLWGPEKTISSVGCIVQLYVYMWLGSIECLLLAVMSYDRFTAICKPLHYFVIMNPRLCVKMIVMVWGISLANSVILCTLTVNLPRCGHNILDHFLCELPAMVRIACVDTTKVELSVFALGIVIVLTPLILILISYGYIAKTVLNMKSKAGQQKAMNTCGSHLTVVSIFYGSIIYLYLQPGNRASKDQGKFLTLFYTIITPSLNPLIYTLRNRDMKDALKKLMRFYHRF

SEQ ID NO: 2036 - protein, 313 aa, Mus musculus
MIPGQNQSWVSEFILIGFSSDPTTNSILFIVFLLIYLSSVLGNGLIIMLVCLDTQLHTPMYFFLSTLSLLDMSFVTTTMPQMLVHLLAHSQTISFASCCLQMFVFGALGITECTFFVVMAYDRYVAICYPLRYTVILNWGLCIRLAAGSWICGFFSSLLHTFFTMSLPYCGPNRVNHYFCEGPSVRSLACMDTHLIEMVDFVLSVFVVVIPISLIVASYIRIAMAILKIKSTQGRCKAFSTCASHLTVVTFFYAPATYIYLRPNSSYSPERDKQVSLFYNAFTALLNPVVYSLRNKDIKRAFLKVMGHSRLDQ

SEQ ID NO: 2037 - protein, 315 aa, Mus musculus
MKKMNYQEIGNYTKVTEFILVGLSRHPTSQSVVFWTLMFLYIVTLAGNSLIIFLVGGNSQLHTPMYFFLGNLSLLDLLFSTSVVPLIMVNSLYNFSTISYSSCFTQLAFRAFLALAECFLLAIMAYDRFVAISNPLRYNLVMSSRVCIFMALLAWMAALLLTVLPILIFPISFCGQNVVNHFSCEVQAIFKLLCSNTISLQIMMIACAVISMPVPLMFILFSYLCILKAVLRIHPTKARLKAFSTCASHLIVVTIYFGTLIYIYMRPQSKISHNGDKIVSIFYAAVTPMLNPLIYTLRNKDVKAVLRRVNCGVKS

SEQ ID NO: 2038 - protein, 302 aa, Mus musculus
MKNSTVLTEFVLTGLTESPELQVPLFLFFLVIYLITIVGNLGLIALIWNDPHLHIPMYFFLGHLAFVDASLSSTVAPKMLLDFLQMNKMISYSECMTQFFIFAICVTTECFLLSAMAYDRYVAICKPLLYPMIMTKRLCICLLVLSFVGGILHSSIHEGFLLLLNFCNSNIVHHFFCDIVPLLKISCADTTLNFQLIFVFAGIIQVFTVVIVLVSYTLVLFTILQRKSVQSMKKAFSTCGAHLLSVSLYYGPLLIMYIFPVSQEADGQDIIDSLFYTVIIPVLNPIIYSLRNKQVMDSRKRC

SEQ ID NO: 2039 - protein, 303 aa, Mus musculus
MEKINHSEISEFIILGLCDSWELQAFFLVIFTSLYLITIFGNIFIVVLIITDLHLHTPMYFLLANLSFIDFCLSSVTTPKMIIDFLKEIKTISFGGCMCQIFFGHFFGGGEMVLLVSMAYDRYVAICKPLHYSNIMSRHMCIGLVMASWMIGFVHSISQLVIIVNLPFCGSRVLDSFFCDIPLVIKLACLDIYVLEILINADSGVLAAICFVLLLVSYFHILTTVCLHSKDGASKALSTCTAHITVVVLFFGPCIFIYLWPVSITWVDKFLAVFYAVITPLLNPAIYTLRNKEIKTAMKRLQC

SEQ ID NO: 2040 - protein, 312 aa, Mus musculus
MNEINYTEVSEFVFLGLSTSKHIQHFFLAFSVVFYVTIVLGNTLVVFTLAFDPHLHSPMYFLLGNLSFIDLCLSTLTVPKMISDLSSGHNTISFQGCVFQIFVLHVLGASEMVLLVAMAWDRYVAICKPLHYLTIMSPRMCLLLLSGAWIIGFLHSVAQLGFVVHLRFCGPNKIDSFYCDLPRFIKLACIDNYRMEFMVAANSGIISIGTFFLLIISYIVILFNVRKHSSGDLSKALSTLSAHISVVVLFFGPCIFVYMWPFPTVPVDKFLAILDFMITPILNPAIYTLRNKDMKVAMRKLSYQFLNFRKMS

SEQ ID NO: 2041 - protein, 313 aa, Mus musculus
MFKKNYTKVSEFVFLGLSSSRKIRPFLLAFSMVLYVAIVLGNTLVVFTLAFDPHLHSPMYFLLGNLAFIDLCLSTLTVPKMISDLSSGHNAISFQGCVFQIFVLHVLGATEMVLLVAMAWDRYVAICKPLHYLTIMSPRMCLMLLSGAWVIGFLHSVTQLAFIIKLNFCGPNEIDSFYCDLPQFIKLACIDPKKMQFMVTANSGFISMGTFLLLIISYIVILFIVRKHSSSGDLSKALSTLSAHISVVVLFFGPCIFVYMWPFPTVPVDKFLAILDFMVTPILNPAIYTLRNKDMKVAMRRLITQLFNLRKSP

SEQ ID NO: 2042 - protein, 313 aa, Mus musculus
MPMDQLNDSRVSEFVLLGLSSSWETKVFLMVTFSMLYIGIILGNLFIVILVIADSHLHSPMYFLLANLSLNDVWVSSTTVPKMISDLLKEHKVISFHNCMTQICFIHIMGGVEMVLLIAMAFDRYTAICKPLRYLSIMSPRICISFVIAGWVTGVVHAMSQFSFVVSLPFCGPNKVDSFYCDFPRIIQLACTDGDKFEFVVAANSGFMSMGTFFLLLLSYVFILVTVWQRSSGDLSKALVTLSAHITVVVLFFTPCMFLYVWPFPTSSIDKYLFIADFAITPALNPVIYTFRNKDIRIAIGRLSKRAVCSRFC

SEQ ID NO: 2043 - protein, 316 aa, Mus musculus
MDGNKTFPSDFTFVGLFTHNKASGFLFSVICATFFMAILANGVMIFLIHIDPHLHTPMYFLLSHLSFIDMMYISTIVPKILVDYIVGKGIISFAACTAQYFLYMGFVGAEFFLLGLMAYDRYVAICNPLRYPVLMSRRVCWFILASSWFGGALDSFLLTPITMSLPFCASHKINHFFCEAPTMLRLACGDKAIYEMVMYICCVVMLLVPFSVVITSYAQILVTVHHIKSEEGRKKAFATCSSHVIVVTLFYGAALYTYMLPQAYHTPLKDKIFSAFYTILTPLLNPVIYSLRNRDVAGALKRVIARHRGACSVERK

SEQ ID NO: 2044 - protein, 316 aa, Mus musculus
MENHNLTMVTEFILMGITACPELQPPLFVLFLIIYLISLIGNLGMIILTLVDSRLQTPMYFFLRHLSTTDLGYTTAVGPKMLQNFLVDQNTISFHLCAIQLSFFSMFIACEIYILSAMSYDRYVAICKPLFYMVIMSKRLCWVLVVIPYVYCTIVALLITIKIFTLSFCGSNVISHFYCDSLPLLSLVCSNTQEIEVILLYLSAFNLISSLLLVLVSYLLILIAIIRMHSAEGRRKAFSTCGSHLTMVTVFYGTLIFMYMQRKSSHSFDTDKVASIFYTMVIPMLNPLIYSLRNKDVKDALHRTLKKIHGFLLKLT

SEQ ID NO: 2045 - protein, 309 aa, Mus musculus
MSMENSSTGTKFILLGMTDNYQLAVLLFGLFFIIYFITVLGNLGLVVLIQVSHRLHTPMYFFLSNLSFLDVCFSSITTPKTLVNLLSQLQEVSFFGCMAQMGLFIVFASAECNILASMAYDRYTAICRPLLYHITMSKVRCLLLVAGCYLGGLLNMVAVTTSITQLSFCQPQVISHFFCDIPPLLALACSDPWVTQVLVVGCGGFTLVTSVMVILVSYLSIFMTIMGIPSVSGKQKAFSTCASHLTAVALYYGTTMYTYLQPSRHGSQAGNRMISVFYTMLIPMLNPLIYSLRNQEVKVALQKILRHSQ

SEQ ID NO: 2046 - protein, 308 aa, Mus musculus
MANLSTVSVFILQGFSAVPALQLLSMAIFLLIYLAAVLGNVSIMIAVTLDSHLHTPMYFFIKHLSLVDLCSTSTTLPRALVATMADTKEISLPACASQLFAFVCFGSLECFLITAMAFDRCLAIYRPLTYGVTMSSQTCVSLVVVAWVSGLLFSTFHMVNTFSLPFCGPNMIDHFFCDIPPLMHLACGDTQGHEAAGFIVSGCVIMTCFALTCLSYVLIVYTVVHIRSAAGRWKAFSTCSSHLATVLLFYGTGSSAYMQPTAHYSPLQGRMAAIFYSILMPTLNPLIYSLRNKDMKAALRKLYPQVPS

SEQ ID NO: 2047 - protein, 319 aa, Mus musculus
MLFCSPQMETSLELTNMTRVQQFVLLGFPTRLGIRDALFVVFLSLYLLTLLENTLIIYLICSHKELHKPMYFFLGNLSCLEMCYVSATMPTLLVGLWTGPYHISFITCMTQLFFFVSLICTECTLLASMAYDRYVAICRPLHYPLLMRPQVCLGLALSSWLGGLVVSAIKTKCIASLIYCGPNVLNQFFCDVSPLLNLSCTHVALTELVDFISAIVIFCGTLLVSLASYSAIGMAVLRMPSAAARRKAFSTCASHLVVVGIFYSAALFIYCRPSRIKSMDLNKVLSVIYTVVTPLCNPIIYCLRNKEVHTVLKKTLHWP

SEQ ID NO: 2048 - protein, 305 aa, Mus musculus
MELNRTQLTEFVLRGITDRSELQVPLFLVFFLIYVITMVGNLGLIFVIWKDPHLHTPMYLFLGNLAFADACTSSSVTPKMLMKFSNKNDMISMGECFAQFYFFCLSATAECFILVAMAYDRYVAICKPLLYVVVMSNRLCIQFIGVSYLIGLLHGLLHVGLLFRLMFCSSNVINHFYCEILPLYRISCTDPSINVLVVFIMGILIQVSTFMSIIVSYILILFAILRTKSERGRNKAFSTCSSHLSSVSLFYGTLFIIYVLSGSDTDNYQGKMYSLFHTIIIPLLNPFIYSLRNKEVIGALRKLRE

SEQ ID NO: 2049 - protein, 314 aa, Mus musculus
MLGNHTSATEFYLVGFPGSVNLRHILFATFCFFYLVTLVGNTVIIVIVCVDKRLQSPMYFFLVHLSILEILVTTVIVPVMLWGLLLPGMQSISLAGCVAQLFLQLALGTTEFSLLGAMAVDRYVAVCNPLRYSVIMNSRTCNSVVIVSWVFGFLFQIWPVYATFHLNYCKSNVVDNFFCDRGQLLKLSCNNTIFIEFILFLMAVFVLFGSLIPTIVSYTYIIATILKIPSASGRRKAFSTCASHFTCVVIGYGCCLFLYVKPKQTQAADYNRVVSLMISIVTPFLNPFIFTLRNDKVIEALRDGVKRCYHFFKS

SEQ ID NO: 2050 - protein, 313 aa, Mus musculus
MLGNYSSATKFFLLGFPGTKELHHILFATFLLLYSVTVLGNMLIIIVVHADKRLQSPMYFFLGHLSVLEILITSVAVPYMLQGLLRQTQIISLSACCVQLYLYLSLGSSELILLGVMAVDRYVAVCNPLRYNVIMSSYTCTWMVTVSWVVGFLFQIWPVYATFQLTFCKTNLLDHFYCDLGQLFKLSCENTLFTELILFLMAVFIIVGSMILTIISYTYIISTILKIPSASGRRKAFSTCASHFTYVVIGYGSCLFLYVKPKQTQAAEYNRVVSLLVLVVEPFLNPFIFTLRNDKFIEAFRDGVKRSCQLLKH

SEQ ID NO: 2051 - protein, 311 aa, Mus musculus
MDQINETVAFEFVLLGLSSSWKNTIFLMSTFSLLYVSIIVGNLFIVFLVINDSRLQSPMYFLLANLSLIDVGLSSTTVPKMISDLLKEHKVISFHSCMTQICSIHIMGGVEMVLLIAMAFDRYTAICKPLHYMSIMSPRICISFVIAGWVTGVVHAMSQFSFVVNLPFCGPNKVDSFYCDFPRIIQLACTDRDTFEFVVAANSGFMTLGTFFLLLLSYVFILVTVWQRSSGDLSKALVTLSAHITVVVLFFTPCMFLYVWPFPTSSTDKYLFIVDFAVTPALNPVIYTLRNKDMKEAIKKLSKQRCYIRIF

SEQ ID NO: 2052 - protein, 327 aa, Mus musculus
MKRKLRHLTVVMSIYNKSDVHPSTFILIGIPGLEAAHMWISIPFCMVYVLALMGNSSLLFIIKTDSSLHEPMYLFLCMLAVADLVVCTTAVPKLLSLFWFHDGEIRFEACLTQIFLIHSCSTMESGFFLAMAFDRYVAICNPLRHSAILTHTVTGGIGLAVVIRGIALLSPHPFLLRWLPYCKTNIISHTYCEFMALIKIACAETSIRRAYSLIVAFLTGGVDFILIICSYVLILNTVFHLPTKDARLKTLGTCGSHVCVILVSYTPAFFSFLTHRFGHKVAPQVHIFVANIYLLVPPMVNPIIYGVRTKKIRNRFLKVFRFSKHTN

SEQ ID NO: 2053 - protein, 341 aa, Mus musculus
MQVVSLLLPSGTLPGSTMMPCNSTSHPSFFILQGIPGMEDKHKWISIPFSSMYFITVMGNCTILLTISMERSLHKPMFLLLFFLALTDLGMSTTTIPKVLCIFWFGQSQISYEGCLVQLFFIHSISAMQSSVLMTMAFDRYVAICKPLRYSTILSNSRIGLIGLASLVRAILFILPMPILLQRMPFHANRVIPTTYCEHMAVVKMVCVDTTFNRIYGLVVAMLVVGVDISAIASSYALILRAIMHLSSKEAHHKAVNTCTTHICVMLVSYTPSLFSFLTHRFGRGIPPHVHTILGNLYFLVPPMLNPIIYGVKTKEFRDKITKYLYRRKEPIIFSHNQKLV

SEQ ID NO: 2054 - protein, 327 aa, Mus musculus
MERRNHTGRVSEFVLLGFPAPAPLRALLFFLSLLAYVLVLTENILIITAIRNHPTLHKPMYFFLANMSFLEIWYVTVTIPKMLAGFIGSEENHGQLISFEACMTQLYFFLGLGCTECVLLAVMAYDRYVAICHPLHYPVIVSSRLCVQMAAGSWAGGFGISMVKVFLISRLSYCGPNTINHFFCDVSPLLNLSCTDMSTAELTDFILAIFILLGPLSVTGASYMAITGAVMRIPSAAGRHKAFSTCASHLTVVIIFYAASIFIYARPKALSAFDTNKLVSVLYAVIVPLLNPIIYCLRNQEVKKALRRTLHLAQGQDANTKKSSRDG

SEQ ID NO: 2055 - protein, 320 aa, Mus musculus
MRNHTVMTTFILLGLTDDPGLQLLFFVILFLTYILSIMGNLTIIILTLMDSHLNTPMYFFLRNFSFLEISFTTVCIPRFLYSISTGVNTITYNACASQIFFVGLFGATEFFLLAAMSYDRYVAICKPLHYMTIMDNKVCAILVLCCWTSGLLVIIIPLGMILQLEFCDSNTIDHFFCDASPLIKISCSDTWFLEQTVIVCAVLTFIITLIVVILSYIYIIRTILRFPSAHQRKKAFSTCSSHMIVVSIMYGSCIFIYVTPSAKEQVDINKGVSMLNTSVAPLLNPFIYTLRNKQVKQAFNDTVKKLHTSYTNKNMLDLSS

SEQ ID NO: 2056 - protein, 323 aa, Mus musculus
MTPRNMTTVSGFLLMGFSDNHELQILQALLFLVTYLLDSAGNFIIITITTIDKQLQSPMYYFLKHLSIMDFSSLSVTVPQYVDSSLARSGYISYGQCMLQVFFFTGLAWSEVAILTVMSYDRYVAICLPLHYEVIMSPRKCTWAVAAVWLSGGISGTLFTASTLSIRFCGHKIIHQFFCDIPQLLKLSCSNDDFGLLKVSTFIAVMGFACFVGIAFSYCQIFSTVLRMPSAEGRSKVFSTCLPHLFVVSFFLSTGICAYLKPTSDSPTALDLMLSIFYTVLPPTLNPVIYSLRNESLKRAVKKLLLSEEFIGKNYVCSVFSAC

SEQ ID NO: 2057 - protein, 323 aa, Mus musculus
MEPQNLSKVTEFQLLGFQNLLEWQSLLFAIFLCFYLLTITGNMVIIGVVSEDPRLRAPMYTFLQHLSFLEIWYTSTTVPLLLSNLASWGHMLSFSACMAQLYFFVFFGATECFLLAAMAYDRYLAICHPLHYSLLMSPDNCAALVTVSWVTGVGTGFLPSLLISKLDFCGPNRINHFFCDLPPLIQLSCSSVYVTEMAIFVLSIAVLCICFLLTLVSYVFIVSSILRIPSTSGRMKTFSTCGSHLAVVTIYYGTMISMYVRPNAHLSPELNKVISVFYTVVTPLLNPVIYSLRNKDFKEAVRKIVRTKCGVYRARVKGSALTT

SEQ ID NO: 2058 - protein, 325 aa, Mus musculus
MKYFCLPRFSIISMLTGNGSFVTEFVLAGLTDRPELQLPLFYLFLIIYTVTVVGNLGLIILIGLNPHLYTPMYYFLFNLSFIDLCYSSVSSPKMLMNFVFEKNSISYEGCMTQLFFFLFFVISECYMLTSMAYDRYVAICNPLLYKVTMSPQVCSMLSFASYGMAFAGASAHTGCMLRLIFCNANVINFYLCDILPLLQLSCTSTYVNEVVVLIVVGINITVPSFTILISYVFILANILNIKSTQGRSKAFSTCSSHIMAISLFFGSGAFMYLNHSGSMDQGKISSVFYTNVVPMFNPLIYSLRNKDVKIALKKVMMRVHSRFIS

SEQ ID NO: 2059 - protein, 327 aa, Mus musculus
MNSENFTRSRVMPAEFILLGITNRWDMRVTLFLIFLPIYLVSLLGNVGMVLLIRIDARLHTPMYFFLANLSLLDAFYSSAIGPKMLVDLLLSRATIPYVACALQMFVFAGLADAECCLLAVMAYDRYVAIGNPLLYTTVMSPRLCLALLGASGLGGAVSAFVHTTFTFRLSFCGSLEVNSFFCDIPPLLAISCNDTSLNELLLFAVCGFIQTTTVLAIAVSYGFIAVAVIRMQSAEGRRRAASTCGSHLTAVSILYGTLIFMYLRPSSSYALDTDKMASVFYTLVIPALNPLIYSLRNKEVKEAFQRTWHRFCCPGRSTRDWPQEAH

SEQ ID NO: 2060 - protein, 318 aa, Mus musculus
MGQSNNVTEFVLLGFTQDPAGQKALFVMFSLMYIATMVGNLLIVGTVIASPSLGSPMYFFLASLSLMDAVYSTAISPKLIVDLLREKKTISFRACISQLFIEHLFGGVDIVILVAMAYDRYVAICKPLHYLIIMNRRVCILFLVMAWVGGFVHSLFQVLAVYNLPFCGPNIIDHFGCDIYPLLLLACTDTYFLGLTIIANGGAMCIVIFILLLLSYAIILRSLQNHSKEGRRKALSTCISHITVVFLFFVPCIFMYVRPVSSFPIDKSITVIYTIVTPMLNPLIYTLRNSEMKNSMEKLLQKMLSPNRIKLSSCCSYD

SEQ ID NO: 2061 - protein, 321 aa, Mus musculus
MGNHTTVNMFLLWGFSSFPELHNLLFVVVLLSHVTIILANAFIMVAIKLNHNLHAPMYFFLFALSFSETCTTMVILPRLLVDLISKNKAISLPECATQMFFFFGLGGNNCFILSAMSYDRYTAIHNPLHYPILMTQKICLHLIVASGVLGFSISLCIVITIFNLSFCNSNIIQHFFCDIDPVVSLACNLTFYHKVILFALTAFVLVGSFIFIMVSYVFIVTVVIKMPSAKGRYKTFSTCSSHFTVVFIHYGFASFVYLRPKNSYSFRDATLLAVTYTILTPLLNPIIYSLRNKGIQTALKKDIGNIIRFFSKMVNKKAQKI

SEQ ID NO: 2062 - protein, 325 aa, Mus musculus
MYVANSSRMNAFILLGLTDNPDLEAPLFIIFNLIYLITLIGNLGMIVLIWFDSHLHTPMYIFLSHLSLADCVYSSAVTPKVMVGLLTGDKVISYGGCVAQMFFFVTFASVDCFLLAVMAFDRHAAVCKPLHYTTNMTTSVCACMVIACYVFSLAESSVYTGFIFDLSFCHSNVIHHFFCDIPPILNLSCSDIYTNEIVLFIITSFNVFFSLIVILTSYAFIFIAILRMHSAEGRKKASSTCASHLTAVTIFYGTIIFMYLQPSSSHSMDNDQMASVFYTTVVPMLNPVVYSLRNKEVHSAFKKAIEKLKSAQHQVLIRDLYSLCN

SEQ ID NO: 2063 - protein, 321 aa, Mus musculus
MEENQTTVTEFILLGFCLGPRIHLVLFLLFSLFYTLTILGNGTILAMICLDSRLHTPMYFFLSHLAIVDMAYACNTVPQTLINLLDETRPITFAGCMTQTYLFLTFAITECLLLVVMSYDRYVAICHPLHYTVIMNWRVCTIMAAVSWIVSFLLSLVHLLLILRLPFCGPHEINHFFCEILSVLKLACADTTLNQVVIFAACVFTLVGPLCFVLVSYTRILVAILRIQSGERRRKAFSTCSSHLCVVGLFFGSAIVMYMAPKSQHPEEQQKILFLFYSFFNPMLNPLIYSLRNAEVKGALRRALCKESHSCLVWCSHHKPW

SEQ ID NO: 2064 - protein, 321 aa, Mus musculus
MEENQTMVTEFVLLGFCLGPRIHLVLFLLFSLFYTLTILGNGTILAMICLDSRLHTPMYFFLSHLAIVDMAYACNTVPQTLINLLDETRPITFAGCMTQTFLFLAFAHTECVLLVVMSYDRYVAICHPLHYTVIMNWRVCTILAAVSWIFSFLLALVHLVLILRLPFCGPHEINHFFCEILSVLKLACADTTLNQVVIFAACVFILVAPLCFVLVSYTRILVAILRIQSGEGRRKAFSTCSSHLCVVGLFFGSAIVMYMAPKSQHPEEQQKVLFLFYSFFNPMLNPLIYSLRNAEVKGALKRSLCKESHSWLVWCSDHKSW

SEQ ID NO: 2065 - protein, 322 aa, Mus musculus
MATKNRTEVTEFVLLGLSSQPEMQPVIFGVVLIMYLMAVLGNTLLVLVACSDPKLHTPMYFLLSQLSLIDISLTTIIVPQMLVHTLSVNRTISYNCCMTQLFSFMTVGSMEVHLLGAMAYDRYVAICDPLRYSSIVSHSLCLRITLTSWVVVSLNSLLYSVLVTRLTFCGNKVTHFFCDITPLLKLSCTRPVVNEMLIFTEGVAVVVSPIFFIFGSYVRIGIVIAHMHSVAALQKALSTCSSHVLVVMFLFGSLVHMYLKPSSSYNLEQDRQVAIFYTLISPMLNPLIYSLRNQEVKGALWRLFRKLYLRQCPAWISHNTCQ

SEQ ID NO: 2066 - protein, 326 aa, Mus musculus
MPLLLFSRAACAMSMRNHTSVTEFILLGISNTEGLESMLFALFLVFYVFALLGNLLIFLTILASPNLHTPMYFFLGNLAVFDIFFPSVNSPKMMDYLVRQGRTISYQGCASQIFFYHTLGCTECFLYTVMAYDRFVAICYPMRYTVIMNPRVCTCFTVGTWLGGFVHGSILTFLIFKLPYCGPNEVDSFFCDIPVVLSLACADTSLAQTVSFTNVGVVALTCFLLVLTSYTRIVISILKIRSSEGRRRAFSTCSAHFTSILLFYGPVILVYLRPASSPWLDSVVQVFNNVVTPSLNPLIYSLRNKEVKLALRKMLSQAMQPLGYKE

SEQ ID NO: 2067 - protein, 322 aa, Mus musculus
MEKITSAVDVHNIPLKNMTEATMFILLGFTDDFELQVFLFLLFLAIYLFTLVGNFGLVVLVIGDCRLHNPMYYFLSVLSFLDACYSTVVTPKMLVNFLSENKSISFLACATQMLLFVSLGTTECFLLAAMAYDRYVAIYNPLLYTVAMSPRVYLPLIIASYAGGVVHGAIHTVATFSLSFCGSNEIKHVFCDIPALLALSCSDTHTNELLVLYLVGLIEIVTILIVLVSYGFILFAILNMHSAEGRRKVFSTCGSHLTGVSIYHGTILFTYMRPSSSYASNHDMVVSIFYTIVIPMLNPIIYSLRNKDVKVAFNKLWRKCDS

SEQ ID NO: 2068 - protein, 330 aa, Mus musculus
MSIHSPGYTVRRIPVNNVTDTTMFILTGFTDDADLQVLLFLLFFVIYLFTLIGNLGLVLLVIGDSRLHNPMYYFLSVLSFLDACYSTVVTPKMLVNFISNDKSISYPGCVTEMFLFVTFGTTECFLLAAMAYDRFVAIYNPLLYAVKMSPRVYIPLIIACYSGGIMHATIHTVATFSLSFCASNEIRHVFCDIPPLLAISCSNTNINQLLLFYCVGSIEIITILIVLVSYSFILFAILKMNSAEGRRKIFSTCGSHLTGVSIYHGTILFMYVRPSSNYALEHDMIVSTFYTIVIPMLNPIIYSLRNKDVKEAMKKIFERNFFMNKVHFKL

SEQ ID NO: 2069 - protein, 330 aa, Mus musculus
MAFLEDGNHTIVTEFILLGLTDDPVLRDILFTIILCIYLVTVSGNLSTILLIRVSSQLHHPMYFFLSHLASVDIGISSSVTPNMLANFLVKPNTISYIGCSIQFTSAVFLATVECFLLAAMAYDRFVAICNPLLYSTKMSREACIQLVVGSYIQGLLNASFFTLSFFSLIFCGPNRINHFYCDLAPLVELSCSDVTLAVVITSISAGFITLTTVFVIAISYSCIFITIMKMHSTESRYKAFSTCTSHLTAVTLFYGTTMFIYVMPKSSYSTDQNKVLSVFYMVVIPMLNPLIYSLRNNEIKGALKRYLGKKIFSYGNLFCKTHYNDTHQV

SEQ ID NO: 2070 - protein, 326 aa, Mus musculus
MERLNHSRVPEFVLLGLTDSPELQIFFFVAFSIFYLMTMLGNCLILFTVLSTSHLHSPMFFLLSNLSLIDICLSSFATPKMIMDFFAHHKTISFEGCISQIFLLHLFTGTEIVLLISMSFDRYIAICKPLYYSTIMSQKVCVGLVIASWMVGFLHTMSQLVFILYLPFCGPNVVDSFFCDLPLVIQLACIDTYVLGVFMVATSGVIALISFLLLLISYIVVLVTIRGHSSIGSSKALSTCTSHFTVVLMFFGPCILIYVWPFTNFLMDKILSVFYTIFTPFLNPLIYTLRNQEVRTAVKKKISNQYFSFGKINPHYTVKGLERSRE

SEQ ID NO: 2071 - protein, 317 aa, Mus musculus
MNQSVVSEFVFLGLTNSWNIQLFLFVFSSIFYVASMMGNSLIVFTVVSDSHLHSPMYFLLANLSFIDLGISSVTSPKMICDLFRKHKVISFRGCVTQIFFIHVIGGVEMVLLIAMAFDRYVAICKPLHYLTIMSPRVCILFSVASWVVGFMHSLVQLAFVVNLPFCGPNVLDSFYCDFPRFIKLACTDTYKLELLVSINSGFMSVGSFFILIISYIVIIFTVQKHSSSGSSKALSTLSAHVTVVVLFFGPVMFFYTWPSSYTHLDKFLAIFDAIVTPFLNPVIYTLRNQEMKIAMMRVFSKLMGCRQIFKHLNFEQT

SEQ ID NO: 2072 - protein, 302 aa, Mus musculus
MDHLPVFILTGIPGMPDKSLWMVFPLGFLYTLTLLGNGTILAVVEVEQSLHEPMYYFLCMLALIDISLSMSTLPSMPPEIPFEACVAQMFFIHVFGLVDSGVLLSIIAFDRFVAIQNPLHYAFILTHGVIGKIGLVVLDRAVCVVFPVPFLIKRLRFCHPNILSHSYCLHQDMMRLACASTRVNSLYGLIIVILILGLDALIILFSYILILKTVLGISSRAERLKALNTCLSHICTVLLFYIPFIGATMIHRFGKHLSPIVHMPMANIYLLLPTLLNPIVYSVKNKQIRGVMKMFQGRKSRA

SEQ ID NO: 2073 - protein, 314 aa, Mus musculus
MGTVNHTDISHTVFHLLGIPGLEDQHMWISIPFFISYITALLGNSLLIFIILTRPSLHEPMYLFLCMLAGADIVLSTSTVPQALSIFWFHAGEISLDRCITQLFFIHSTFISESGILLVMAFDRYIAICYPLRYITVLTKSLIGKIGVGIFLRSYGTIFPIIFLLKRLTFCRTNILPHTACEHAGLSKYACNDLQVHIWYGFFVLMSTVNLDVVLIFVSYVLILRAVFHMPSQDARHKALNTCGSHVCVIILFYGPGIFSTLNHQFGYKISTGVHVLLANVCILAPPMLNPIIYGVKTKQIRDQVTHVLFLKVI

SEQ ID NO: 2074 - protein, 311 aa, Mus musculus
MRGENITKVSTFILLGFPTAPELQYLLFLLFLLAYLFVLVENLTIILTVWSSASLHRPMYYFLGSLSFLEIWYVSDIIPKMLDGFLLQRKRISFTGCMTQLYFFISLVCTECVLLASMAYDRYVAICHPLRYQVIMTTGLCVQLVAFSFASAFTVSVIKVYFISSATFCGSNVLNHFFCDISPILKLACTDFSTAELVDFILAFIILVFPLLATILSYGYITLAVLRIPSATGRWRAFSTCASHLTVVTFFYVAMLFIYVRPQAIDTRSSNKLISAVYTVLTPILNPLIYCLRNKEFKDAVKRTLGLGHTL

SEQ ID NO: 2075 - protein, 318 aa, Mus musculus
MEEGNQTGMVLFHFRPFSKLPEVQMLIFVLFLMMYLVSIGGNMSIVLTIWTNRCLHTPMYFFLANLASLEIFYSSTIAPLTLASILSTERTVVSLAGCGAQMFFFIFLGSADCILLAVMAYDRFVAICHPLRYTLIMSWHLCVQLALGSLLLGFILAMQLTVLIFQLPFCSSKEISLFYCDVLPVMRLACADTHVHEATLFVVSVIVLTIPFLLITLSYVFIVDAILKIRSAEGRHKAFSTCSSHLTVVLLQYGCTSLIYLCPSSSYSPERGQVVSVVYTFITPVLNPLIYSMRNRELKDALRRVIMKLVLIQTQEAL

SEQ ID NO: 2076 - protein, 314 aa, Mus musculus
MTEENQTVVTQFILLGLPIPPEHQHLFYALFLSMYLTTVLGNLIIIILIHLDSHLHTPMYLFLSNLSFSDLCFSSVTMPKLLQDMQSQVPSIPYAGCLAQLYFYLYFADLESFLLVAMAYDRYVAICFPLHYMSIMSPRLCVSLVLLSWVLTTFHAMLHTLLVARLSFCEDNVIPHFFCDISPLLKLSCSDTHINELVIFVMGGLVIVIPFLLIVVSYARVVTSILKVPSVRGIRQVFSTCGSHLSVVSLFYGTIIGLYLCPTANNTTVKETVMAMMYTVVTPMLNPFIYSLRNRDMKGALARVLCKKKITFCL

SEQ ID NO: 2077 - protein, 272 aa, Mus musculus
MAFENASMVIEFILLGITDQPDLKIPFFLLFFVGYMITVLGNLTLIILIGLNSHLHTPMYFLLFNLSFIDLCYSSVITPKMLMSFIQKKNIISYTGCMIQLYFFCFFVISECYVLTSMAYDRYVAICNPLLYNVTLSSKVCCYLMLGSYFMGFSGAMIHTGCILRLTFCDGNTINHYFCDLLPLLQISCTSTYINEIELFIVAGKDIIVPTIIIFISYGFILFSVLKIKSTESRSKAFSTCSSHMLAVSLFFGSGAFMYLIPSNWNEIETYF

SEQ ID NO: 2078 - protein, 315 aa, Mus musculus
EKQQDNGTWLVTEFLLVGFSNLPELRPTLFILFLLTYLVTLSGNATIITIIQVDRTLHTPMYRFLAVLSLSETCYTLVTIPNMLAHLLMESQAISIAGCRAQMFFFLGLGCSHCFLLTLMGYDRYVAICHPLRYSVIMRPTVCLCLGALVFCSGFSVALIETCMIFSSPFCGAGHVEHFFCDIAPVLKLSCDESSLKGLGIFFLSILVVLVSFLFILLSYAFIVAAIVRIPSASGRRKAFSTCAAHLTVVIVHFGCASIIYLRPDSGANPSQDRLVAVFYTVVTPLLNPVVYTLRNKEVRVALRKNLARGCGAFK

SEQ ID NO: 2079 - protein, 309 aa, Mus musculus
IKNQTLTEFILLGLTDAPELQVCVFLFLLLTYILSVLGNLTIIVLTLLDSHLQTPMYFFLRNFSFLEISFTSTFTPRVLFSISTGIKTISFAGCFTQYFFAILFGATEFYLLTAMSYDRYVAICKPLHYTTIMSNRVCTLLVLCSWMSGFLIILFPIILTSQLDFCASNVLNHYYCDYGPLIEIACSDTRLLELFDFVLAVVTLIVTLVLVIFSYTRIIRTILKIPSAQQRKKAFSTCSSHMVVISLSYGSCIFMYIKPSATEGVAFNKGVAVLNNSVAPLLNPFIYTLRNKQVKQSFKDITRKIVNLQ

SEQ ID NO: 2080 - protein, 312 aa, Mus musculus
ETIANSTLVTEFFLEVFAEIWELRILITVLFLLVYLCSLLGNLTIIIVTTVDQTLNTPMYFFLRNLSILDMGYISITVPSTCINSLTNHRNISVAGCAAQIFSFLFCAYVEILFLSIMAQDRYVAICKPLLYPVIMNHQFCVQMTLASLLSSLVIASVHTFKTFQLSFCHSNVVPQFFCDLPALLRLSCSDTFSNKLLILLTVIGVSGSCFVFIAISYIHILSTVLKIPVKGERGKAFSTCVPHIIVVSVFVSSAAFVYLRPPVITFEVVQEMVISVFYTMVPPFLNPIVYSLRNKQIKEAVRKVILRVFPI

SEQ ID NO: 2081 - protein, 319 aa, Mus musculus
MEINNQTSFPVSSFILLGLSAHPKLEKTFFMLILLMYLVILLGNGILILVSILDSHLHTPMYFFLGNLSFLDICYTTSSVPLILDSFLTPRKTISFSGCAVQMFLSFAMGATECVLLSMMAFDRYVAICNPLRYPVVMNKAAYVPMAVSSWSGGIAVSVVQTSLAMKLTFCGDNVINHFTCEILAVLKLACADISINVISMGVTNIIFLGVPVLFISFSYVFILVTILRIPSAEGRKKAFSTCSAHLTVVLVFYGTILFMYGKPKSKDPLGADKQDLADLISLFYGVLTPMLNPIIYSLRNKDVRAAVTNLVVLKKSFT

SEQ ID NO: 2082 - protein, 314 aa, Mus musculus
MNHEELESINNVSTVIQFVLIGFSDLPNLQGFLFAVFSVVYIIILIGNFLIIIIISTDQALQKPMYFFLANFSSLEICYVSVTVPRILFNIGTQNRSISLMSCATQLCFFLVFGTTECLLLAVMSYDRYVAICNPLHYPLVMNPTKCTQLAAVSWLGGIPVQIGQTCQIFSMNFCNSYKINHFFCDIPPILTLACGNTSVHELSVYVVVMVVAAFPFILVLTSYSKIIATILRLPTAKGRGKAFSTCSSHLLVVLLFYGSATVTYLRPKSMHSPGTDKLLSLFYTIVTPMFNPLIYSLRNKEVIAALRKLILKK

SEQ ID NO: 2083 - protein, 310 aa, Mus musculus
QANHSSAERFLLLGFSDWPSLQPVLFALVLLCYLLTLTGNAALVLLAIRDPRLHTPMYYFLCHLALVDVGFTTSVVPPLLASLRGSMLQLPRAGCMAQLCSSLALGSAECVLLAVMALDRAAAVCNPLRYTSLASPLLCRTLARISWLGGLANSAAQTALLAARPLCAPRCLDHFICELPALLQLACRGGRSATERQMFAARVVILLVPSAVILASYIAVGRAVWGMHSSSGWRKAASTCGSHLTAVCLFYGSATYTYLQPTHSYNQGRGKFVSLFYTVVTPALNPLIYTLRNKEVKGAALRLLRSLGRP

SEQ ID NO: 2084 - protein, 308 aa, Mus musculus
MSNQTSVTEFLLLGVTDIQELNPILFVVFFTIYFVNITGNGAILMIVILDPRLHSPMYFFLGNLACLDICFSTVTLPKMLQNLLSTSKAISFLGCITQLHFFHFLGSTEAMLLPVMAFDRFVAICRPLHYSVIMNHQLCIHMTVTIWTLGFFHALLHSVMTSRLSFCGPNHVHHFFCDIKPLLDLACGNTELNLWLLNTVTGTIALTPFFLTFLSYFYIITYLFLKTRSCSMLHKALSTCASHFMVVILLYVPVLFTYIRPASGSSLDQDRIIAIMYSVVTPALNPLIYTLRNKEVRSALNRKVRRWL

SEQ ID NO: 2085 - protein, 315 aa, Mus musculus
LSVICQILAHLQLETHSMQTKGSTGSVAFYIITILGNLGMIILIQVDIQLHTPMYFLLRHLPLLDGTSISLYTSVITPQIMATLAKNKMTISCGRCATQFFSFTICAVTECFLLSVMAYDRYVAISNSQLYTVIMSPKKCWSLVAVAYVGGLFGVILRTTCTFSLFFCEDNQINFFFSDLPPLLKLACSDTINIEIIVVCFGNFVILANALVILISNMFIIKAVIKLKSSGSRGKTFSTCTSHLTAVGLLFGILIFIYIQRSSGKSLEEDKVVSVFNTVIIPMLNPLIYTLRNKDVKAAFRKVTGRFQVSQTLQN

SEQ ID NO: 2086 - protein, 277 aa, Mus musculus
MPNFTDVTEFLLVGLTRRQELRVLFFVVFLVVYMVTLLGNIGMIILISISLQLQSPMYFFLSHLSFVDVLFSSNVTPKMLENLISETKTISYVGCLVQCYFFIALVHVEVYILAVMAFDRYMAICNPLLYSSKMSRVVCIRLISVPYVYGFSVSLICTLWTYGLYFCGNIKINHFYCADPPLIKIACGGVHIKEYTMIVIAGINFTYSLSVVLISYVLIVVAVLRMHSADGRRKAFSTCGSHLTAVSMFYGTLIFMYLRRPTEESVEQGKMVAVFYT

SEQ ID NO: 2087 - protein, 312 aa, Mus musculus
SWEDGNHTALTEFILLGLTDEPVLRVVLFTIILCIYLVTVSGNLSTILLIRVSSQLHHPMYFFLSHLASADIGYSSSVTPNMLVNFLVEKNTITYLRCGIQLGSSAFFGTVECFVLTAMAYDRFVAICSPLLYSTKMSIQVCIQLLVVAYISGFLNASSFTLSFFTFFFCGPNIINHFFCDFTPLVELSCSDDRVSIILATISVGTVIFITVLIIVVSYIYILITILKMHSTEGRHKAFSTCTSHLTAVTLFYGTVTFIYVMPKSNYSTDQNKVVSVFYMVVIPMLNPLIYSLRNNEIKGALKRQLGRKIFS

SEQ ID NO: 2088 - protein, 315 aa, Mus musculus
MWMIPGQNQSWVSEFILIGFSSDPTTNSILFIVFLLIYLSSVLGNGLIIMLVCLDTQLHTPMYFFLCTLSLLDMSFVTTTVPQMLVHLLAHSQTISFAGCWLQMFVFGALGMTECTFFVVMAYDRYVAICYPLRYTVILNWGLCMRLAAGTWISGFFSSLLHTFFTMSLPYCGPNRVNHYFCEGPSVRSLACMDTHIIEMVDSVLIVILVIVPISLIVASYIRIVMAILKIKSTQGRCKAFSTCASHLTVVTLFYVPASYIYLRPNSSYSPERDKQVSLFYNVFTALLNPVVYSLRNKDIKRAFLKVMGHARVDS

SEQ ID NO: 2089 - protein, 447 aa, Mus musculus
MSVFNASNIEIPTFVLIGIPGLEHVHIWLSIPICLMYLVAIMGNCTILFLIKTETSLHEPMYYFLSMLAFSDLGLSVSSLPTVLRIFLFNSTEISSDACFAQEFFIHGFSAMESSVLFIMAIDRFIAVYNPLRYTSILTVRRVFKTGLIFATFCIAVVLPFPFILKRLKFCKKSLLSHSYCLHQDVMKVACSNNRINVIYGFFVATSSLLYLVFISVSYMLILKIVLGCEEPPSHLPLDGTDSCVLSGKHNLHTCRGSFPAMCSAFPVMTTGPMGCSQSGSNTSAEDNSPKGRVLPLSLLLSCSCSFSCFLALSCFFVLVLFLSLALLLSCSLAPEDVSNKAFAAEDSGLLRSSWLVVNAGKMGITSHKGRLKFFNTCISHICAVLIFYVPIITLAALHRFAKNISPVIGVIIADIFLLVPPLMNPIVYSVKSQHIRNLIQTKFCEK

SEQ ID NO: 2090 - protein, 325 aa, Mus musculus
MAFLPASGVAAVNSSDTRVTGCLLTGIPGLEHLQMWLSIPFCIMYIAALVGNSVLVCVILSQSSLHETMYIFLSMLASADVLLSTSTMPKTLANFWLGSSHISFDGCLTQMFFIHFLFVADSAVLLAMAFDCYVAICSPLRYTTILTRQVMGKMAAAILTRSFIIMLPCIFLLKRLHYCRINVIEHTFCEHMGIARLSCSDISINVWYGLTAALLSTGLDIILIAVSYVHILAVFRLSSQEARSKALSTCGSHVCVILLFYIPALFSVFAYRFGGKHIPRYVHILLANLYVVIPPMLNPVIYGVRTKQILEGAKQMFTNITKEFK

SEQ ID NO: 2091 - protein, 309 aa, Mus musculus
  VARIANT (90)...(95): Any amino acid
MGTALHETNSSEVHVSEFILLGFPGIHEFQIWLSLPMALLYIVALGANLLILITIYLEPTLHQPMYQFLGILAAVDIGLATTSMPKIRPXXXXXXYAIHTFMCMESGVFLCMAIDRYVAICYPLQYPSIVTEAFVIKATLSMLLRNGLLTIPVPVLAAQRQYCSRNEIDHCLCSNLGVISLACDDITVNRFYQLALAWLVVGSDMILVYASYALIIRSVLRLNSTEAASKALSTCSSHLILIMFYYTAIVIVSVTHLAGRRVPLIPVLLNVMHIVIPPSLNPVVYALRTQELKVGFRKVFSLSEFVSRK

SEQ ID NO: 2092 - protein, 300 aa, Mus musculus
MIKNNQTVISQFLLLALPIPPQHQQLFYALFLAKFLTTVLGNLIIIILILDSHLHTPMYLFLSTLSFSDLCFSSVTMPKLLQNMQSQDTSITYAGCLTQMYFFMVFANMENVLLVVMAYDRYVAICFPIHYTSIMSPKHCVSLVVLSWVFTILYSMLHTLLLARLSFCEDNVIPHFFCDLSALLKLACSDIYINEVMIFIFEGLDTVIPFLLIFVSCVQIVCSILKFSTTWGIAKIFSTCGSHLSVVSLFYGTIIGLYFCPTNNSTVKDTAMAMMYTVVTPMLNPFIYSLMNKDMKEALI

SEQ ID NO: 2093 - protein, 310 aa, Mus musculus
MNNQTVISQFLLLGLPIPLEYKHLFFALFLTMYLNIILGNLIIIILILLDTHLHTPMYFFLSNLSFSDLCFSSVTMPKLLQNMQSQDPSIPYASCLTQMYFFMAFGNMEIYLLVVMAYDRYVAICFPLHYTSIMSPKLCVSLVVLSWVFTILYSMLHTLLLARLSFCEDNVIPHFFCDISALLKLACSDISINELMIFIVGGLDTVIPFLLIVVSYVQIVCSILKFSSTRGIHKVFSTCGSHLSVVSLFYGTIIGVYICPSANNSTVKETVMSLMYTVVTPMLNPFIYSLRNRDMKEALIRVLCKKQISL

SEQ ID NO: 2094 - protein, 311 aa, Mus musculus
MPGKNQTIISEFLLLGLPIPPEQQHLFYALFLAMYLTTVLGNLIIIILIRLDSHLHTPMYLFLSNLSFSDLCFSSVTMPKLLLNMQSQIPSISYASCLAQMYFFLFFGALENFLLVVMAYDRYVAICFPLHYTSIMSPRLCVSMVVMCWVLTTFDAMLHTLLMARLSFCEDNVIPHFFCDMSALLKLSCSDTHVNEVVIFIIGGLGVVLPFLLITVSYARIISSILKVPSTQGIQKVFSTCGSHLSVVSLFYGTIIGLYLGPSAYYSTLKDTVMSMMYTVVTPMLNPFIYSLRNRDMKGALKRLFQKKTIF

SEQ ID NO: 2095 - protein, 311 aa, Mus musculus
MPRNNNQTTISQFLLLGLPIPQEFQHLFYALFLAMYLTTVLGNLIIIILIRLDSHLHTPMYLFLSNLSFTDLFSSVTMPKLLQNMQSQVPSIPYAGCLTQMYFFLFFGDLESFLLVAMAYDRYVAICFPLHYTSIMSPRLCVSLVLLSWLLTMSHSMLHTLLLTRLSFCENNVIPHFFCDLSALLKLACSDIHINELVILIIGGLVVILPFLLITVSYARIISSILKVPSTQGIHKVFSTCGSHLSVVSLFYGTIIGLYLCPSANNSTLKDTVMSMMYTVVTPMLNPFIYSLRNRDMKEALKRVLQKKTIF

SEQ ID NO: 2096 - protein, 317 aa, Mus musculus
MEQDNQTWVHEFILLGLSNDWGTQVSLFVLFLLMYLVTVLGNFLIIVLIRLDSRLHTPMYFFLTNLSLVDASYATSIVPQLLAHFLATHKAIPFLSCAAQLFFSLGLGGIEFLLLAVMAYDRYVAVCDPLRYSVIMHTGLCTRLVITSWVSGSINSLVHTAITFQLPMCTNKYIDHISCEILAVVRLACVDISSNEIVIMVSSIVLLMTPFFLVLLSYIQIISTILKIQSTEGRRKAFHTCASHLTVVTLCYGTTIFTYIQPHSSPSVLQEKLISLFYAVLMPMLNPMIYSLRNKEVKGAWQKLLGKFSVFTSKLTS

SEQ ID NO: 2097 - protein, 308 aa, Mus musculus
MEIPHNITEFFMLGLSQRPEIQRLLFVVFLVIYAVTVCGNMLIVVTVTFSSSLASPMYFFLSNLSFIDTCYSSSLAPKLIADSLVRDDFFSYEGCMAQLFGAHFLGGVEIILLTVMAYDRYVAICKPLHYTTTMTRHLCVVLVAVAWLGGFLHSLVQILLIFQLPFCGPNVINHFVCDLYPLLELACTNTYVIGLLVVANSGVICLLNFLMLAASYIVILHSLRSHSAEGRRKALSTCGAHFTVVTMFFVPCIFSYMRPSTTLPIDKNMAVFYGILTPMLNPLIYTLRNEEVKDAMRKLFTRSEVVGA

SEQ ID NO: 2098 - protein, 275 aa, Mus musculus
TVLGNGLIVVTVNIKESVFPPMYFFPPITCPLVEISYSSTVVPKFITDLLNKIKTISPKGCLAQIFFFHFFGVTEILLLTVMAYDRYVAICKPLYYTTIMSRPKCHRLVAGSWVGGFFHSIIQIFITLPLPFCGPNVIDHYFCDLHPLFKLACTDTFVVGVIMFVNSGLFSVFSFLFLVSSYIVILYNLRNHSAEGRRKALSTCASHIMVVVLFFGPAIFLYLRPASTYTEDKLVAVFYTVITPMLNPIIYTLRNAEVKNAVRKLWGKKVSSSLE

SEQ ID NO: 2099 - protein, 308 aa, Mus musculus
MADIHNVTEFLFLGLSPNQEVQRVCFVLFLLLYMAIVLGNLLMVVTVVASRNLGSPMYFFLDSLSFVEIYSSMTATKLILDLLTEKKSISVWGCMIQLFFIHFVGAAEIFLLTMMAYDCYVAICKPLHYTSIMNQSVCAVLLGTAWMGGFVHCLAQILLLLPLPFCGPNVIDHYFCDVFPVLKLACSDTFLIGLLIVANGGTLSVISFVVLLASYVVIFFYLRTQSAEGWRKTLATCGCHVTVVILFFGPCVFIYLRPSDTLPVDKMIAVFYTVITPLLNPLIYSLRNAEVKKTMKCLWFRTMKVDEK

SEQ ID NO: 2100 - protein, 307 aa, Mus musculus
MNYRTNITEFILLGFSQTKEIEVICFVLFLLCYIAILFGNLLIMISVTWSHLINQPMYFFLSYLALSDLCYTSTVTPKLIINLVTTKKSISYNGCMTQLFTMHFFGGIEVFILTGMAYDRYVAICKPLHYTILMSRQKCDAVIAASCAGGFLHSFGQFILAVFLPYCGPNEIDHYFCDVYPLLKLACTDTRKIGFLVIANSGLMGLVTFVVLLISYGVILYTVRSYSAENRRKALSTCSSHITVVVLFFAPLLFIYIRPATTLPEDKVFALFYTIIAPMLNPLIYTLRNKEMKNAIKRLCYLMSGSE

SEQ ID NO: 2101 - protein, 306 aa, Mus musculus
KDTDSPNQTATEFLLLGFSGKSEQEEVVFGMFLGMYLVTISGNLLIILAISCDPHLHTPMYFFLANLSSVDISAPSVIVPKAVNYMLGIKTISYTECMIQIYFFITFINMDGFLLSVMAYDRYVAICHPLRYTMMMRSRLCVLLVAISWVITNLHALLHTLLMVRLTFCSHNAVHHFFCDPYPILKLSCSDTFINDVAAFTEGPLIFLTPLICIVLSYAYIYAKVLKMPSAHRIRKALSTCGFHLTVVCLFYGAILGAYKHPSSSYSLQDAVASIIFNVVTPMVNPFIYSKRNHDIKGALKKFCRT

SEQ ID NO: 2102 - protein, 254 aa, Mus musculus
HPSLRLFLWAVSLSLYTVALMGNMVIIALITSSTGLHSPMYFFLCNLATMDIICTSSVLPKALVGLLYEENTISFKGCMAQLFFLLWSGSSEVLLLTVMAYDRYVAICCPLHYSSRMSPQLCAALAVAVWSICAVNASVHTGLMTQLSFCGPKVITHFFCEIPPLLLLSCSPTYVNSVMTLVADAFYGGINFLLTLLSYGCIIASILHMRSAEGKRKAFSTCSSHLIVVSVYYSSLFCAYISPASSYSPERSKF

SEQ ID NO: 2103 - protein, 208 aa, Mus musculus
SSFFLWSGSSELLLLTVMAYDRYVAICCPLHYSSRMSPQLCAALVVAVWSICAVNASVHTGLMTQLSFCGPKVITHFFCEIPPLLLLSCSSTYVNSVMTLVADAFYGGINFLLTLLSYGCIIASILHMRSAEGKRKAFSTCSSHLIVVSVYYSSVFCAYVSPASSYSPERSKFTSVLYSVLSPTLNPLIYTLRNKDVKLALRRLLPSF

SEQ ID NO: 2104 - protein, 311 aa, Mus musculus
MNEVNQSMVSEFVLLGLSNSQNLQVLLFVIFLIVYLLILSGNIVIVILITIDRHLHSPMYFLLANLSFVDIWLSVTTPKMVTDFLRENKTISFEGCMSQVFFDHCIGAAEMVLLLVMAYDRYVAICKPLHYFTIMNLKRCTALVLISWTIGFVHALSQLVPVLQLPFCGPLEIDSFFCDIPLVINLACMDSHHLDTLVNADCGVVVVTCFILLLISYTYILITVHQSSKAGASKALSTCTAHITVVLLLFVPCIFIYVWPLNITWFDKFLAVFYSVVTPLLNPAIYTLRNKDIKHSLKRLKSSFMNHKVNT

SEQ ID NO: 2105 - protein, 314 aa, Mus musculus
MSNYTGQSYFTLVGLFSQSKHPALLAVVIFVVFLMSLSGNALLILLILSDTHLHTPMYFFISQLSLMDMMYISVTVPKMLMDRILGNHKVSQAAACGMQMFLYMSLGGSEFLLLAAMSYDRYVAICHPLRYPVLMNHRVCLLLISTCWILGSLDGFMFTPVTMTFPFCGSREIHHFFCEAPAVTKLSCSDTWLYETLMYVCCVLMILIPVTVISGSYTSILLTVLRMNSAEGRKKALATCSSHMTVVTLFYGAAIYTYIFPVSLHSPEKDMVVSVFYTILTPLLNPLIYSLRNKNVTEGYEETVGYKTPLSQKQ

SEQ ID NO: 2106 - protein, 208 aa, Mus musculus
MESGNSTRRIPSFFLLGFSENPHLQFLIFVLFLSMYLVTVLGNLLIIMVIITQSPLHTPMYFFLANLSFVDICFTSTTVPKMLVNIQTQSKAITYADCISQMSVFLVFAELDNFLLAVMAYDRYVAICHPLYYTFIVNQHLCILMVLLSWVVSILHAFLQSSIVLQLTFCGDVKIPHFFCELNQLSQLTCLDSLSSHLIMNLVPVLLG

SEQ ID NO: 2107 - protein, 221 aa, Mus musculus
FLACAADVLLLHIWLTHSFLLTVMGYDRYVAICHPLRYNVLMSPRGCACLVTWSWVGGSFMGTVVTTAIFNLTFCGPNEIHHFACHVPPLLKLACGENVLEVAKGVGIVCITALLGCFLLILLSYAFIVVTILKIPSAEGRHKAFSTCASHLTVVVVHYGFASVIYLKPKGPKSLEGDTLMGITYTVLTPFLSPIIFSLRNKELKNAMKKIFLSKLYPEKI

SEQ ID NO: 2108 - protein, 308 aa, Mus musculus
MMNFSIVSEFMILGLTQKSELQGILFIVFLFIYLVALLGNMLIVVAIIYNTTLHTPMYILLLALAVVDIICTTSIIPKMLGTMLTSKNSISYGGCMSQLFFFTWSLGAEMVLFTTMAYDRYVAICFPLRYSTIMNHYTCVGLLSIVMAIAVTNSWVHTGLILRLTFCGPNIIDHFFCEIPPLLALSCSPVRVNEVMVYVADITLAVGDFTLTCISYGFIIAAILRIRTTEGKKKAFSTCSSHLMVVSLYYSPVIYTYIRPASSYTFDKDKVVAALYTLVTPTLNPIVYSFRNKEMQSGIKKVFAFLKG

SEQ ID NO: 2109 - protein, 318 aa, Mus musculus
MDVSNQTTVTEFVLLGLSAHPKLEKTFFVLILSMYLVILLGNGVLILVSILDSHLHTPMYFFLGNLSFLDICYTTSSVPLVLDGFLTPRKTISFSGCAVQMFLSFAMGATECVLLGMMAFDRYVAICNPLRYPVVMNKAAYVPMAVSSWVAGGANSLVQISLAVQLPFCGDNVINHFICEILAVLKLACADISINVISMGVANVIFLGVPVLFIFVSYIFILSTILRIPSAEGRKKAFSTCSAHLTVVIIFYGTILFMYGKPKSKDPLGADKQDLADKLISLFYGLLTPMLNPIIYSLRNKDVKAAVRNLASHRCLTF

SEQ ID NO: 2110 - protein, 309 aa, Mus musculus
MEDMAAGNHCTVTEFFLVGLSEKPELRLPLFLFFTGIYLITVTGNVGMITLIGLSSHLHTPMYFFLDSLSFIDFCQPKMLVSFLTKQNIISYTGCMAQLYLVITFGVAECYTLAAMAYDHYVAICNPLLYNVTMSYQIYSSLISGVYIFAVFCSSLNTGLMFRTQFCNLDVINHYFCDLPLLKLASSNTYTNEILILFFATLNVFVTVLTIITSYIFIIATIRCIHSREGKFKAFSTCSSHISAVAIFYGSGAFTYLQPSSLNSMGQAKVSSVFYTTVVPMLNPLIYSLRNKDVSIALKKILQRKKNHV

SEQ ID NO: 2111 - protein, 320 aa, Mus musculus
MLYPSSMSEITNFTHDPFYFILTGIPGFEDIHLWISIPFCLYTISIMGNTTILTVICTEPSLHQPHYLFLSMLALTDLGLALTTLPTIMHLLWFNIREISFEACFAQFFFLHGFSFMESSVLLAMSFDRYVAICCPLHYASILTSEVIARIGLAIICRCVLAVLPFLFLLKRLSFCHSHLLSHSYCLHQDMIHLVCTDIRVNSWYAFALVLLIIILDPLLIVLSYAVILKSVLNTATWTERLRALNNCLSHMLAVLVLYVPMVGVSMTHRFAKHASPLVHVLMANIYLLAPPVMYPIIYSVKTKQIRQGITRLLLQRKVH

SEQ ID NO: 2112 - protein, 307 aa, Mus musculus
MKNSTEVTHFLLLGLTDDPGLQLPLFLIFLFIYTITLVGNLGMILLIVLDSRLHTPMYFFLCNLSLVDFCYSSAVTPTVMTGLLIGNKIISYNGCAAQMFFFAGFATVENYLLASMAYDRYAAVCKPLHYSSTMTTSVCISLSIVSYACGFLNASIHIGDTFILSFCRSNVVHHFFCDVPAVMVLSCSDRHVSELVLVYIVSFNIFVALSVIWISYIFIFITIFKMKSSAGYRKAISTCASHFTAVSIFYGTIIFMYLQPSFSHSMDTDKIASVFYTMVIPMLNPLVYGLRNKEVKSAFIKTFQVAK

SEQ ID NO: 2113 - protein, 319 aa, Mus musculus
  VARIANT (62)...(120): Any amino acid
MNHSSVIDFILEGLTKRPELQLPLFLLFLAIYVITVVGNLGMILLITISSQLHSPMYYFLSXXXXXXXXXXXXXXPXXXXXXXXXXXXXXXXXXXXXXXXXXXXXXXXXXXXXXXXXXXXLLLQKGYLLTAMAYDRYVAICSPLLYNIVMSHKVCSIMMAVVYSLGFFGATVHTTRMTMLSFCGSHIVSHYFCDILPLLTLSCSSTHINEVLLFIIGGVNTLAPTLAFILTSILRIRSNEGRSKAFGTCSSHIMAVGIFFGSITFMYFKPPSSNNMEQEKVSSVFYTTVIPMLNPLIYSLRNKDVKNALKKMVGGRQLS

SEQ ID NO: 2114 - protein, 335 aa, Mus musculus
  VARIANT (102)...(108): Any amino acid
KFTTSTDEVLFKREKLNASTLMEFILLGFSNVPHLQWVLFMVFLFMYMTILLCNSIIIVLAKTDPALQTPMYFFLSNFSFLEICYVTATIPRMLMDLYTKEXXXXXXXETFLCLPVQHKMYFVLTLGGTECLLLAAMAYDRYVAICHPLQYSLLMKNKVCLQLVAASWISGIPVEIGQTYQIFSLHFCASNRIDHFFCDIPPLLKLACGDTFMNTVAVYVVAVLFVMVPFLLIIVSYIKIICNIMKLSSAKGMAKAFSTCSSHLIVVILFYGTASITYLQPKQSQSEGMGKMLSLFYTILIPALNPIIYSLRNKDIMMALRKLHSKLLIWWENLK

SEQ ID NO: 2115 - protein, 309 aa, Mus musculus
MSNLSTSRFVLTGFPGLEVYYFFFAIPFSTIYAMVFLGNCMILHVIRTESSLHQPMFYFLAMLALTDLCMGLSTVHTVLGILWGFLQEISLDACIAQSYFIHGLSFMESSVLLAMSFDRYIAICNPLRYSSILTNDRILKIGVAILCRSSMLIPPVIIRLKFLNYCRPHFLSHSFCLHQDLIRMACSDIRFNSFYALSLVICTLLLDAVLILASYVMILHTVLSIASREERIKSLQTCVSHISAVLVFYIPIIGLTMVHRFGKHLSPLVQVLMGNIYILFPPLMNPIIYSIKTQQIRVRIQRLFSLNGI

SEQ ID NO: 2116 - protein, 133 aa, Mus musculus
MSVFLMSNLSTSRFVLTGFPGLEVYYILFAIPFSVMYAMVFPGNCMTLHVIQTDPSLHQPMFYFLGMLALTDLCMGLSTVNMVLGILGDFLQEISLDACIYYSKGNGCQKFVFVNINFKPYVSVCKRNLFLRN

SEQ ID NO: 2117 - protein, 230 aa, Mus musculus
QVLLIFWFNMKPISFVGCFLQMFVMNTFLPMESSTFLVMAYDRYVAICHPLRYPSIITEQFVINAAIFIVARNLLATLPTPVLAARLNYCASNVVENCICANISVAKLSCGDIRLNKLYQFVSVWCLLGSDLVLILLSYCFILRVVMCQQSGGTVTKALSTCGSHLILILFFSTLLLVFIFTNKAGKKIPSEVPILLNVLHHLIPPALNPIVYGVRTQEIKQGIIKLFKH

SEQ ID NO: 2118 - protein, 312 aa, Mus musculus
MIKNNQTLFSQFLLLGLPIPAEHQQLFFALFLLMYLTTILGNLIIIILIRLDSHLHTPMYLFLSNLSFSDLCFSSVTMPKLLQNMQSQDTSITYAGCLTQMYFFVILFGGLEIFLLVVMAYDRYAAICLPLHYTSIMSLKFCVCAVLISWVFNLLYSMLHTLLLARLSFCEDNIICHFFCDMSALLKLACSDIYINELMIFILGGPLVVIPFLLIVVSYVQIIFSILKASSTRAIYKVFSTCGSYLTVVSLFYGTVIGLYFCPSENNFTAKEASITMMYTVVTPMLNPFIYSLRNRDIKEALIKVLIKKIPL

SEQ ID NO: 2119 - protein, 314 aa, Mus musculus
MIMNNQTAIFQFLLLGLPIPPDYQHLFYALFLVMYLTTVLGNLIIIILIHLDSHLHTPMYLFLSNLSFSDLCFSSVTMPKLLQDMQSQVPSISYGACLTQIYFFLVFGNMESFLLVVMAYDRYVAICFPLHYTSIMSLKLCTCLMLLSWMLTTSHAMMHTLLAARLSFCENNVVLNFFCDLFALLKLACSDTYVNELMIFLVSGLLVVIPFLLIVISYAKIVSSILRVPSTKGIYKVFSTCRSHLSVVSLFYGTIIGLYLCPSGNNSTLKENVMAMMYTVVTPMLNPFIYSLRNRDMKGALVRVVCNKKISLKW

SEQ ID NO: 2120 - protein, 318 aa, Mus musculus
MELKNQTAVSEFHLLGLTDNHRMLPLVFIMFLFMYLITVFGNLIIIMAISSGSQLHTPMYLFLSILSINDICYSTVTIPKMLVNIQAHDDSISYIECLSQICFVSIFGGMENCFSLAVMAYDRYVAICKPLRYTVIMNPICCVLMVLFSLFFSIMDALLHSLMVLRLSFCTDLEIPHFFCELAQIIKLACSDTFLNNFLIFVAAFVFGGGPVCGIIFSYIYIVSSVLRMPSSGGKHRAFSTCASHLSVVSLFYGTGFGVYISSAVTDSLRNTAMASMMYSVVPPLLNPFIYSLRNREMKEALRKLVGRLIYLICIMCY

SEQ ID NO: 2121 - protein, 309 aa, Mus musculus
MDSVNVSLVAEFILVGLTDKPYLQIPLFFVFLAMYLVTALGNLSLIILTVLNSHLHTPMYFFLFNLSFVDLCYSSVFTPQMLMNFIRKNTTSYMECMAQLYFSCFFVISECYVLTSMAYDRYVAICKPLLYNLVMSSKLCLNLMLVSYFIAFSESVAHTACMLRLNFCDANTINYYFCDIPPLLQLSCTTTRVNEVVIFVVGSINIIIPTSTIFVSYGFILSSIFRISSSEGRSKAFSTCSSHIIAAFLFFGSGAIRYFKPSSDGSMDEGKISSVFYTNVIPMINPLLYSLRNKDIKVALRRTLRKRNF

SEQ ID NO: 2122 - protein, 313 aa, Mus musculus
MVMNNQTVISQLLLLGLHIPPDHQHGFYTLFLAMYLTTILGNLIIITLIILDSHLHTPMYLFLINLSFSDLCFSSVTVPKLLQNMQSQDTSISYAGCLTQMYFLMVFGDMESFLLVVMAYDRYVAICFPLHYTSTMSPTVLCVCVVLLSWVFTIMYSMVHTLLLSRLSFCEDNVIPHFFCDLSALLKLACSDIFINELMIFILGGPVVAIPFLLIVVSYVRIVSSILKVSSSQGIHKIFSTCGSHLSVVSLFYGTIIGLYLCPSANNSTVKKIAMAMMYTVVTPMLNPFIYSLRNRDMKEALIRVLCKKKISL

SEQ ID NO: 2123 - protein, 323 aa, Mus musculus
MARGNQTSTFEFLLWGLSEQPQQQHILFLIFLGMYLVTVAGNLLIVLAISTDVRLHTPMYFFLASLSCDDILLVSTIVPKALVNIHTQSRTISYAGCLVQLYFFLTFGDMDIFLLATMAYDRFVAICHPLHYRMIMSFQRCSLLVTACWTLTNLVAMTHTFLIFRLSFCSQKVIPDFFCDLGPLMKIACSETRINELVLLFLGGCIILIPLLLILVSYIRIVSAIIRVPSAQGRRKAFSTCGSHISVVALFFGTVIRAYLCPSSSSSNSVVEDTAAVVMYTVVTPLLNPFIYSLRNKDMKGALVRILKGKVSFSWAQGLLQRK

SEQ ID NO: 2124 - protein, 316 aa, Mus musculus
MESWNSTLGGTFILVGILDDSGSPDLLCAVITALYMLAMISNGLLLLVITMDAQLHVPMYLLLGQLSLIDFFLTSIIIPKAVMDFLLKDNTISLEGCALQMFLALTLGGAEDLLLAFMAYDRYVAICHPLNYMIFMRPSICWLGVATSWILGLLSALGYTIHTMQYPFCKSRKIRDLYCEIPPLLKLACADTSKYELMVYVMGVAFLIPPLAAILASYILILFTVLNKPSNEGRKKALVTCFSHLTVVGLYYGALTVMYVLPSSYLSPKQENLLSVFYTVVTPALNPLIYSLRNKEVTGALRRVLGKWFLPTQSTF

SEQ ID NO: 2125 - protein, 314 aa, Mus musculus
MNNYTTQSDFTLVGFFSQSKHPALLAVVIFVLFLMALSGNALLILLILSDIHLHIPMYFFISQLSLMDMMYISVTVPKMLMDQVLGSHKISAAACGMQMFLYVTLAGSECFLLAAMSYDCYVAICHPLQYPVLMNHRVCLLLMSLCWVLGSLDGFMFTPVTMTFPFCGSREIHHFFCEVPAVTKLSCSDTWLYETLMYVCCVLMLLIPVTVISGSYTSILLTVLRMNSAEGRKKALATCSSHMTVVTLFYGAAVYTYMLPASLHTPEKDVVASVFYTIVTPLLNPLIYSFRNKNVTEAVKKLLGVSTLFQETVK

SEQ ID NO: 2126 - protein, 317 aa, Mus musculus
MEKTNHSLTTQFILVGFSDHPDLKTPLFLLFSVIYLVTMVGNLGLVAVIYLEPRLHTPMYIFLGNLALMDSCCSCAITPKILENFFSVDRRISLYECMAQFYFLCLAETADCFLLAAMAYDRYVAICNPLQYHSMMSKKLSIQMSIGTFITSNLHSLIHVGCLLRLTFCKSNRIDHFFCDILPLYRLSCTDPFINELMIYIFSMPIQVFTITTVLVSYFCILLTIFKMKSKDGRGKAFSTCASHFFSVSIFYVCLLMYIRPFDEGNKDIPVAVFYTIIIPLLNPFIYSLRNKEVVNAVKKVMKTHSIFKNASASMAR

SEQ ID NO: 2127 - protein, 311 aa, Mus musculus
MQNQSFVTEFILLGLSQNPKVEKILFVVFLLVYIATIGGNMIIVVTIIYSPALLSSPMYFFLIFLSFLDACTSSTVTPKMIVDFFYERKTISFECCITQLFTSHFFAGVEVIILTSMAYDRYVAICKPLHYSSIMTRRLCGTLVMVAWTGGFLHSITQVIFTLQLPFCGPNFIDHFICDLFPLLQLACTDTHIFVILVFANSGSFCIIIFSLLIVSYGVILFSLRGHSSEGRRKALSTCGSHITVMILFFVPCMLIYARPSSAFSFEKNTLIFASVLTPLFNPMVYTFRNKEMKNAIRKMCRKLLVDSDNF

SEQ ID NO: 2128 - protein, 201 aa, Mus musculus
LGLSADPELQPIIFGLFLFMYLVTFLGNLIITLTISAECHLHTPMYFFLSNLSVADICISSTTVPKMLLNIQTQDHRITYSGCLTQACFVLLFAGLENCLLAAMAYDRYVAICHPLRYTVIMNSCFCSILIVVSLAISAVNALLLSLMVLHLNFCTKVEIPHFFCELAQIIKLACSDTLINNILIYISAFMFGGIPFFGIF

SEQ ID NO: 2129 - protein, 317 aa, Mus musculus
MVSLNHTQFHPYFLLLLLGIPGLEDTHLWIGFPFCVVVVVYLTALLGNITIISVIQTEHSLHQPMFYFLSILSSIVLGLSTSTIPEMLRTFWLNFKKILFDGGVIQMFFIHLFIGMESAVLLAMAYDRYVAICNPLHYTLVLTNKVVFINACLVLLRPLVTAIPFIVLIQRLPFCGHQVILHTYCEHMGITLLPCASIKVNIIYGLCAISTLVFDIVAIIVSYIIQVLHAVSHLPSRDARLKALSTCGSHVCVILSFCTPAFFSFMINQFERNVPRYIHILLANLYVVIPPALNPVIYGVRTKKIRERVAMAIRNKL

SEQ ID NO: 2130 - protein, 162 aa, Mus musculus
MNWILHTTMVSPNQTVVTEFVLQGFSEHPSLRLFLMGCFLSLYTVALMGNMVIIALITSSTGLHSPMYFFLCNLATMDIICTSSVLPKALVGLLYEENTISFKGCMAQLFFLLWSGSSEVLLLTVMAYDRYVAICCPLHYSSRMSPQLCAATGRGCMVHLCC

SEQ ID NO: 2131 - protein, 263 aa, Mus musculus
LLPLPLIYLLTVLGNLLIIVLIHSDPRLHTPMYFFLRNLSFADLCFSTTTVPQVLVHFLVKRKTISFAGCSTQIVVLLLVGCTECALLAVMSYDRYVAVCKPLHYSTIMTHWVCVQLAAGSWASGALVSLVDTTFTLRLPYRGNNVINHFFCEPPALLKLASADTYSTEMAIFAMGVVILLAPVSLILTSYWNIVSTVIQMQSGEGRLKVFSTCGSHLIVVVLFYGSGIFAYMRPNSKIMNEKDKMISVFYSAVTPMLNPIIY

SEQ ID NO: 2132 - protein, 289 aa, Mus musculus
LQFWLGLPFGTAYLIAVLGNVIILFVIYLEHSLHQPMFYLLAILSATDLGLFTATVPRALGIYWFGFHKIASRNCAQMFFMHLFTGMETFILVAMAFDCYIAICNPLYNTILTTRMICIIAGVGLLRNFILVFPLIFLILRRSFCEHNIILHTYCERMGIARLACISIKVNVLFGLILIYMILLDVILSALSYVKILHAVFKLPSWEARLKALNTCGSHVCMILAFFTPALFSFLAHRFGHNIPRYIHILLANLYIIIPLVLNPIIYGMRTKQIQDRPVTILFSKEVLL

SEQ ID NO: 2133 - protein, 305 aa, Mus musculus
VMYILFFCRKLQDGSLLYFFPLLFIYTFIVIGNLLIFFAVRLDSHLHNPMYNFISIFSFLEIWYTTATIPKMLSNLINEKKSITITGCLLQMYFFHSLGNSEGILLISMAVDRYIAICNPLRYQMTMTPSLCVQLSAGSCIFGFLILLPESVMISTLPFCGPNQIHQIFDLVPVLSLACTDTSMIVIEDVIHAVAIIITFLTIALSYVRIVIMILRIPSAEGRKKAFSTCAGHLMVFLIFFGSVSLMHLRFNATYPPVLETAIALMFTVLAPFFNPIIYSLRNKDMENAIKRLFCLHKVLNTSES

SEQ ID NO: 2134 - protein, 286 aa, Mus musculus
WLHSTLFYFTSNFLEIPGLENMHCWIGFPFFAVLLTAVLGNITIVCVIQTEYSLPQPMFYFLAILSSTDLSSHLQSPQFLESCSRKDIIQMFCIYVFSGMESAVLVAMAYDHFMANCCPLHYTLVLTNKVIFIISWVILLRSLVFFAMPFVLLTLWLPFYKHQITLHLHQCHQIYGLCATPILICDIVAIIISYVQIFSAAFQLSSQDAQLKALGTCGSHACCHLTFYTLVFFSFMTHRFGHNIPHCIHILVASVYVVILPVLNPLIYSIRTKWIIEQVLKMFCKK

SEQ ID NO: 2135 - protein, 317 aa, Mus musculus
SSNTLNYTNVRDIWYTMIGIPGLEESHIWISIPICSIYIVAIAGNALLLFLIITERSLHEPMYLFLSMLALADILSTVTTPKMLAIFWFRAGGISFASCVSQMFFLHFIFVAESAILLAMAFDRYVVICYPLRYTTILTTSVIIKMGIAAVIRSFFICFPLIFLVYRLTYCGRNIIRHSYCEHMGIARLACDSIKVNIYYGMIVALFSICLDAVLIIVSYALILCAVFRIPSRDARLKALGTCGSHVCVILLFYTPAFFSFFAHRFGGHSIPLHVHILLANLYVVVPPSVNPIIYGVRTKQIQERIIQMFSLGKSFC

SEQ ID NO: 2136 - protein, 245 aa, Mus musculus
MLHMQDNTEFLSNFTSQLPTFLLTGIPGLESAHSWISIPFCCLYATALSGNSMILFIIVTQHSLHEPMYYFLSVLSATDLGLTFSTMSTTLRILWFQANEISLDFCIVQMFFLHGFTFIESGVLVAMAFDRYVAICNPLRYTMILTNSRIIQMGFLVIMRALLLIVPLLLLLKPVSFCKRNTLSHSYCYHPDVIKLACSDTRANSICGLVDLILTTGIDTPCIVLSYILIIRSVLSIASLKKGTR

SEQ ID NO: 2137 - protein, 247 aa, Mus musculus
MECKRNVSEFLLMGLSSSQNTEVFCFIFFLFCYFTILSWNLLILFSIRCSSLFNQPMYYFLSHLASMDICYTSCVTPKLIGDLLAERKTISYTDCMLQVFAMHFFGMIETLILTVMAFDRCVAICKPLHYMVIMSRNRCHVFIWASWVGGVAHSFPQVMMLVCLPFCGPNEIDHYYCDVFPLLKVACTDTYIIGVLMVANSGMVASVIFVLLFGSYVVILFTLRNYSAEGRRKALSTCGSHISVVIL

SEQ ID NO: 2138 - protein, 219 aa, Mus musculus
SISIMGCMLQLLAYGTFATIDSFILAAMAVDRYVAICNPLRYPIVMSQRLCILLLVGSYTMGFLNASVNTSFTFSLKFCKSNAINHFFCDEPPILALSCSSIDFSIMLLTVFVGFNLVSTVLVVIFSYTYVLSAILRMSSAAGRKKAFSTCASHLTAVTIFYGTLAYMYLHPHTNDSQEQEKAASVFYGIIIPMLNPLIYSLRNQDVIEAFKKIVKKCL

SEQ ID NO: 2139 - protein, 312 aa, Mus musculus
MAEGNQSTVTEFILTGLTNKPELQLPLFLLFLGIYLFTELGNLGMVILISISSHLHTPMYFFLSSLSFIDLCYSTVIIPKMLVNFVTEKNIISYPECMTQLYCFLVLVISECYMLSAMAYDRYVAICNPLRYNVTMSYQVCLWMIGGVYCIGLIEATLHIVCMLRVLFCKANVVNHFFCDLLPLLQLACSSTFVNEVVLLCLSTFNFCVPMLTILSSYSFIIASILRIKSTESRFKAFSTCSSHFTSVAVFFGSLGFMYFQPSSVSSEDQGKVSSVFYTTVVPMLNPLIYSLRNKDVKVALNKLLRKKTFHM

SEQ ID NO: 2140 - protein, 287 aa, Mus musculus
NPFLPNLLLGHDVCAGIETLTKTLLIRVSSQLHHPMYFFLSNLASIDIAYSSSVTPNMLANFLVKQNTISYIGCSIQFGSTAFWGTVECFLLAVMAYDRFVAICNQLLYSTKMSTEACIQLVLGSYIGGFLTALSFILSFFLFIFCGPNRINHFFCDAPLVELSCSDVSVSVLVTSFFVGLVTVITVFVIAISYIYILITILKMRSTEGSHRAFSTCTSHLTAVTLFYGTVTFIYVIPKSNYSTDQKKVVSVFYTVVIPMLNPIIYSLRNNQIKGALKRLLGKKIFS

SEQ ID NO: 2141 - protein, 89 aa, Mus musculus
MSASLKDFNSSKFLVSEFILLGFPGIHSWQHWLSLPLTLLYLSAIGTNVLILIIICQDPSLKQPMYLFLGILSLVDMGLATTIMPKILA

SEQ ID NO: 2142 - protein, 318 aa, Mus musculus
LAFLEYGDHTTVKECILLGLTDDPVFRVILFSIILCIYLVTVFGNLSTILLIRVSSQLHHPMYFFLSHLGSPDIGASSVTPIMHVNFLVDKNIIMTLGCNIHLGSGAFFGTVECFVLAAMAYDCFVAICSSLLYSNKMSSQVCVQLLVVTYVSSFLNTSCFTLSFFSFYFCGPNRIKLFFCDFTPLVELSTFDSVSILVTISGGTVIVITVFIIAVSYIYIFITILKMHSTGCRHKAFFTCTSHLTTVTLFYGTVTFIYLMPKSSYSTDQNKVVSVFCIVVIPMLNPLIYSLRNNEITDALKRHIGRKTCSWRNLLCC

SEQ ID NO: 2143 - protein, 320 aa, Mus musculus
GFLLDGNHTAVTEFILLGLTDDPVLRVILFTIILCFYLVTVSGNLSTILLIRVSSQLHHPMYFFLSHLASVDIGYSCTVTPNMLVNFLLERSTTSYTECGIQLGSADFIAPVECFLLAAMACDPFMAVNPLLYSTKMSTQVCVQLVLGSYVGGFLSLIIMAYFFSFLFFGPNRINHFFCNFDPLAELSCSDVSVSILISFLAASIAIITGFVIAFSYSYILITILKMHSTKGRHKAFSTCTSHLTAVTLYYETITFIYVMPKSSYSTGQNKVASQFYMVVIPMLNLLIYSLSNNEIKGALKRQLDMKTFSYNNLLFCTTI

SEQ ID NO: 2144 - protein, 336 aa, Mus musculus
  VARIANT (205)...(236): Any amino acid
MALSNSSWRQPQPPFFLVGVPGLEESQHWIALPLGILYLFALVGNVTIIFIIWTDSSLHQPMYLFLAMLAAIDLVLASSTAPKALTVLLAHAHEIGYIVCLTQMFFIHAFSSMESGILVAMALDRYVAICHPLRHSTILHPGIIGRIGLVVLVRGLVLLFPFPILLQNVVFCRATVISHAYCEHMAVVKLACSETTVNRAYGLSXXXXXXXXXXXXXXXXXXXXXXXXXXXXXXXXIGISYALILQAVLKVPGGEARLKAFSTCGSHVCVILIFYVPGMFSFLTHRFGHHVPHHVHVLLATLYLLVPPALNPLVYGVKTRQIRQRVLRVFYTKASI

SEQ ID NO: 2145 - protein, 206 aa, Mus musculus
HIFTAMETVVLVAMAFDRYVAICNPLRYSQILTNRTIGLILVVVFGVNFILLIPLVFLILRLPFCGHHIIPHTYCEHMGIARLACANIKVNMIFGLILISMVLADVLLIAISYMRILRAVFCLPSRDARLKALNTCGSHICVILAFFTPAFFSFMTHRFGRNVPAYIHILLANLYVVVPPALNPVIYGVRTKQIRDQVLSIFWKKT

SEQ ID NO: 2146 - protein, 287 aa, Mus musculus
MIPGQNQSWVSEFILIGFSSDPTTNSILFIVFLLIYLSSVLGNGLIIMLVCLDTQLHTPMYFFLSTLSLLDMTFVTTTMPQMLVHLLAHSQTISFTGCWLQMFMFGGLGITECTFFVVMAYDRYVAICYPLRYTVILNWGLCIRLAAGSWICGFFSSLLHTFFTMSLPYCGPNRVNHYLCEGPSVRSLACMDTHIIEMVDLVLSVFLVVTPISLIVASYIRIAMAILKIKSTEGRCKAFSTCASHLTVVTFFYAPATYTYLRPNSSYSPERDKQISLFYSAFTPLLN

SEQ ID NO: 2147 - protein, 192 aa, Mus musculus
DRYVAICHPLRYTVIMNSCFCSILIVVSLAISAVNALLLSLMVLHLNFCTEVEIPHFFCELAQIIKLACSDTLINNILIYISAFMFGGIPFFGIFLSYTEIVSSVLKIPSRQGRHKAFSTCGSHLSVVSLFYGTGLGVYISSAVTESPRKTAVASVMYSIVTQMLNPFIYSLRNRDMKEALRKHVGRIASIV

SEQ ID NO: 2148 - protein, 313 aa, Mus musculus
  VARIANT (71)...(117): Any amino acid
MMEYENYTFNSDFILLGLFSSSKTSLTFFSFIFFIFIMAITENALMILLIHRDSRLHTPMYFLLSHLSFMXXXXXXXXXXXXXXXXXXXXXXXXXXXXXXXXXXXXXXXXXXXXXXXMSYDRYVAICHPLRYPVLMRDNSSRLLAAGSWLVGILNSIVHTVFALHFPFCHSRAIDHFFCEVPAMLKLSCIDTTHYERGVYVSGIIFLLIPFSMISISYVQILLTVFQMQSSGARQKSFSTCSFHMVVVIMYYGPFIFTYMRPRSYHTPGQDKFLAIFYTILTPTLNPIIYSFRNKDVLMAVKNIVQSNFLNKK

SEQ ID NO: 2149 - protein, 135 aa, Mus musculus
MWMFPKQNQSWVSEFILLGFSSVPTTNSILFIVFLLVYLSSVLGNGLIIMLVCLDTQLHTPMYFFLCTLSLLDMSYVTTTMPQMLVHLLAHSQTISFVGCWLQMYMFSALGIAESILFVVMAYDRYVAICYPLRY

SEQ ID NO: 2150 - protein, 216 aa, Mus musculus
CLAQMFFIHSFTAMESGFFLAMAIDRYVAICDPLRHTTILTNSRIAKMGAVVVLRGVGFFSPHPILLKQLPYCRTRIIAHTYCEFIAVVKLACVDTGATKRYSLSVASVIGSCDGFFIALSYVLILRAVFRLPSREASLKALGTCGSHVCVILVFYSTAVFTFLTHRFGHNVAPQIHIFIANMYLLVPPFLNPIVYGIRTKKIREYVLSFLRVKFS

SEQ ID NO: 2151 - protein, 311 aa, Mus musculus
MENYTRVKELIFLGLTQSQEVSMVLFLFLLLVYVTTLLGNLLIMVTVTCESRLHTPMYFLLRNLSVADICFSSITAPKVLVDLLSDRKTISFNGCLTQMFFFHLIGGVDVFSLSVMALDRYVAISKPLHYVTIMSRGRCIGLIVASWVGGFAHSIVQISLLLTLPFCGPNVLDTFYCDVPQVIKLACTDIFVLELLMISNNGMLTTLWFFLLLVSYMVILLLLKSQSGEGKKKAISTCTSHITVITLHFVPCIYVYARPFTALPTDKAISVTFTVISPLLNPLIYTLRNQEMKSAMRRLRKRLGPSYWIER

SEQ ID NO: 2152 - protein, 311 aa, Mus musculus
  VARIANT (186)...(186): Any amino acid
  VARIANT (187)...(193): Any amino acid
MPHTNSTKITEFILLGLTDRPELQPLLFVLFLFIYLVTLLGNMGLMALIRLDSRLHKPMYFFLSNLAFVDLCYTSTATPQMLTNFLSEKKTISFIGCFIQCYLFIALLLTEFYMLAAMAYDRYVAICNPLRYSVKMSRRVCICLAMCPYIYGFSDGLFQTILTFSMTFCKSNVINHFYCADPPLIXLXXXXXXLSNSLTIVLVSYAFIIAAILRIKSAEGRRKAFSTCGSHMMAVTLFYGTLFCMYVRPPTDKTVEESKIIAVFYTFVSPLLNPLIYSLRNKDVKQALKTILRQNVIRTALMRPPSNKLHQ

SEQ ID NO: 2153 - protein, 242 aa, Mus musculus
MDGGNQSGDSEFLLLGLSEVPEHQRILFWTFLSMYLVTVVGNVLIILAIGSDSHLHTPMYFFLANLSFTDLFFVTNTIPKMLVSLQSQNKAISYPGCLTQLFFLVSLVALDNLILAVMAYDRYVAICHPLHYTTAMSPKLCILLLILCWALSILYGLIHTLLMTRVTFCGSRKIHYIFCEMYVLLRLACSNTHINHMMLIATGCFVFLVPFGFMIMSYICIVRAILKIPSASNKYKAFSTWC

SEQ ID NO: 2154 - protein, 351 aa, Mus musculus
  VARIANT (231)...(232): Any amino acid
  VARIANT (234)...(278): Any amino acid
MDIPSNNTIPRGFLLQGFFEFPHLKPLLFLVLLAVHLATLSGNLLILVAVISVPSRPPMLLFLCQLSAIELCYTLVVVPRSLADLSMPGHGRGSPISFLGCAVQMQMFVALGGAECFLLAAMAYDRYVAICHPLRYASIVTPGLCARLALACCLGGLAVSVGLTVAVFHLPFCGSRLLVHFFCDITALLHLACTRSYVDELPLLGACLVLLLLPSMLILTSYGAIASALRXXPXXXXXXXXXXXXXXXXXXXXXXXXXXXXXXXXXXXXXXXXXXXXXCASHLAVTFLHYGCATFMYVRPKSSYSPRLDRTLALVYTNVTPLLYPLIYSLRNREITSAIHRVLGFRGSGSV

SEQ ID NO: 2155 - protein, 304 aa, Mus musculus
  VARIANT (199)...(222): Any amino acid
MRNHTVITEFVLLGISDTPELQLVLFIFLLITYILSVTGNLTIIILTLLDSRLKTPMYFFLRNFSFLEITFTSVSIPRFLGSIITKVKTISYNNCLAQLYFFISMGVSEFFLLTAMSYDRYVAICKPLHYTLIMNQKVCTLLVLASWLAGFLTIFPPLMLVLKLDFCASNVIDHFSCDYFPILQLSCSDPRSLEMMAFXXXXXXXXXXXXXXXXXXXXXXXXQRKKAFSTCSSHMIVISMSYGSCIFIYVKSSANERASLTKAVAVLNTSIAPMLNPFIYTLRNQQVKQAFKDLIYKVLLYRSK

SEQ ID NO: 2156 - protein, 329 aa, Mus musculus
  VARIANT (209)...(215): Any amino acid
MAKNNITTVTEFILIGFNDHPKWEIPLFLVFLSFYLVTMLGNLGMVILIHVDVQLHIPMYFFLSHLSVLDACYTSVITPQILATLATGKTVISYRCCAAQFFFFTICAATECFLLSVMAYDRYVAISNPLLYTVAMGPRKCWSLVVGAYVCGMCGAILRTTCTFSLSFCENNQINFFFCDLPPLLKLACSDTTNIEIIIVFFGGILFRXXXXXXXGNFVISANALVILISYLLIIKAVMRMKSSGRRAKTFSTCVSHLTAVALLFGTLIFMYIRSGSKKSLEEDKVVSVFYTVVIPMLNPLVYSLRNKDVKAAFKKVTGKWQVSHSIQY

SEQ ID NO: 2157 - protein, 302 aa, Mus musculus
  VARIANT (95)...(104): Any amino acid
MKNRTSVSEFILLGLTNDPKLNILIFVFLFITYILSITGNLTIITLTLIDSHLKTPMYFFLRNFSFLEISFTTVSIPRFLVSIVTGDMTISYSSXXXXXXXXXXTAMSYDRYVAICKPLHYTTIMSSRVCMQLIVSSWLAGFLIIFPPVIMGLQLDFCDSNIIDHFTCDSSPLLLISCTDTAFLELFAFFLAVLTLIVTLTLVILSYSFILRTILRIPSAEQRKKAFSTCSSHMIVVSISYGSCIFMYVKTSAKEGVTLTKGIAVLNTSVAPMLNPFIYTLRNKQVKEAFKTLIKKRFSNKI

SEQ ID NO: 2158 - protein, 241 aa, Mus musculus
  VARIANT (116)...(122): Any amino acid
MTIHNNRSVSHPDTFFLIGIPGLEEIHAWISLPFCCIYLVALMVNTMILVVIKTERSLREPMFYFLAILSSVDLALSTTSVPRMLGIFWFDAHEINFGGCVAQMFLIHAFTGMEAXXXXXXXNIHINAVYGLFVVSLFLLNLVLIGISYGYILRAVFRLPSQDARLKALSTCGSHVAVLCVFYIPSVFSFLTHRFGHNIPHYIHILVANLYLVIPPSLNPIIYSVRTKQIREHVLHIFTKR

SEQ ID NO: 2159 - protein, 240 aa, Mus musculus
LSFSSLPTMLKIFFFNAMAISPNACFAQEFFIHGFTVMESSVLLIMSLDRFLAIHNPLRYSSILNGRRVAKIGLILAFRSTVLVLPFPFTLRKLKYCHKNLLSHSYCLHQDVMKLACSDNKINFIYGFFVALCTMLDFALILMSYVLILKTVLSIASLAERLKALNTCVSHICAVLIFYVPIITLAAIHRFAKHKSPLLVILIADMFLLVPPLMNPIVYCIKTRQIREKVLGKLVNLCVR

SEQ ID NO: 2160 - protein, 281 aa, Mus musculus
  VARIANT (146)...(248): Any amino acid
MENRTVPTEFILLGLSDDPGLQIVIFLFLILMYILSITGNLTIITLTLVDPHLQTPMYFFLRNFSVLEITFTTVCIPRFLSTIVTRDKTISYNSCTAQLFFFIFLGITEFYLLTAMSYDRYVAICKPLHYTTIMNRRVCILRSFLXXXXXXXXXXXXXXXXXXXXXXXXXXXXXXXXXXXXXXXXXXXXXXXXXXXXXXXXXXXXXXXXXXXXXXXXXXXXXXXXXXXXXXXXXXXXXXXXXXXXXXXAPMMNPFIYTLRNQQVKQAFKDAIQKVVLFSGK

SEQ ID NO: 2161 - protein, 140 aa, Mus musculus
MSLYNITEVHPSSFLLLGIPGLEYAHIWIGFPFCFLYLIAILGNAAVLFVIQTEHSLHEPMYYFLAMLDSIDLGLTTATIPKMLGIFWFNLREISFGGCLSQMFFIHFFTVMESIMLLAMGFDRYVAICKPLQYTVILTN

SEQ ID NO: 2162 - protein, 305 aa, Mus musculus
MGEDNRTSVTEFIFLGLSQDPQTQVLLFFLFLFIYLLTVLGNLLIIVLIHSDPRLHTPMYFRNLSFADLCFSTTTVPQVLVHFLVKRKTISFAGCSIQLVVLLLVGCTDCALLAVMSYDRYVAVCKPLHYSTIMTHWVCVQLAAGSWASGAFVSLVDATFTLRLPYRGNNVINHFFCEPPALLKLASADTYSTEMAIFAMGVVILLAPVSLILISYWNIICTVIQMQSGEGRLKVFSTCGSHLIVVGLFYGSAIFAYMRPNSKIMNERDKMISVFYSAVTPMLNPIIYSLRNKDVKGALRRITSR

SEQ ID NO: 2163 - protein, 355 aa, Mus musculus
  VARIANT (101)...(161): Any amino acid
MGEDNRTSVTEFIFLGLSQDPQTQVLLFFLFLFIYLLTVLGNLLIIVLIHSDPRLHTPMYFFLRNLSFADLCFSTTTVPQVLVHFLVKRKTISFAGCSTQXXXXXXXXXXXXXXXXXXXXXXXXXXXXXXXXXXXXXXXXXXXXXXXXXXXXXXXXXXXXXLLAVMSYDRYVAVCKPLHYSTIMTHWVCVQLAAGSWASGALVSLVDTTFTLRLPYRGNNVINHFFCEPPALLKLASADTYSTEMAIFAMGVVILLAPVSLILTSYWNIISTVIQMQSGEGRLKVFSTCGSHLIVVVLFYGSAIFAYMRPNSKIMNEKDKMISVFYSAVTPMLNPIIYSLRNKDVKGALRRITLK

SEQ ID NO: 2164 - protein, 193 aa, Mus musculus
DHYVAICNPLRYATVLTNARIVAMGLGTVLRSFVLIVVFPVLLHRLPFCHPQNILSHAYCLHVDMIKLACTDVSLNSHYGLSIVLLTFGLDSALILISYVLILRSVLAIASREERLKTLNTCVSHILAVLIFYVPMVSVSIVHRFGAGLPHAVHILMSILYLFVPPMLNPIIYSIKTKEIRRRLLKMLFRVKL

SEQ ID NO: 2165 - protein, 313 aa, Mus musculus
LLVSLEQRIMKFLTGIPGLETQHGWLSIPIFIMYMVAIVGHSLIMAAVQQVSVFHEPMYLFFYMLAINEVGVSESTMPTVRSSLWFDANRIDLDGCLAQMLFIHTFSGMGSGVLLTMSYEDFVTIYNPLRHTAFLTLPRIISMGLGITLKSVTLMAPLQILLKQRPYCHINILSHSYGLHADLIQLPCADTRLNSILRLTIVLATFGLDSLFIVVSYGLILYTVMGIASGEGRKKALNTCVSHICAVLIYYVPMIGVSMMHRVAKHASPVVHTLMLSIYLFVPPVLNPIIYSVKTRPIQQGIANLFSCKKGSI

SEQ ID NO: 2166 - protein, 193 aa, Mus musculus
RYVAICDPLRHASIFTQRLLTQIGVGVTLRAALFVAPCLFLIKCRLKFYWTTVVSHSYCEHMAIVKLAAEDVHVNKIYGLFVAFSILGLDIIFITLSYIRIFITVFKLPQKEARLKAFNTCIAHICVFLEFYLLAFFSFFTHRFGYHVPSYIHILLSNLYLLVPPLLNPIVYGVKTKQIRDQVSKILYCNYSY

SEQ ID NO: 2167 - protein, 218 aa, Mus musculus
PITKVIYASNLPFVLSNFLLGANKICFETCLLKMFSIHSFSIMESGVLLAMSVDRFVAIYKPLRYPVKLTLPRIAGTRVTLGLKSLLLMFLLPFLLKRLPFCGHNVLSHSYCLHSDLIQLPCGDTRPNSILGLRIVTSTFGLDSLLIVVPYVLILSMVSLFRLVLVVDRRGEKEHAFMNELKISLEKYLPILPVQVASVVLYWPRQHSARKVVSNLMT

SEQ ID NO: 2168 - protein, 305 aa, Mus musculus
MPIFYNSTSPTFLLTGVPGLEWAHPWISIPFCCLYFTALSGNSLILFLVLTEPTLQEPMYYFLSMLSSTDIGLCISTIVTVLGIFWLNAREISFSACLSQMFFIHLFTFMESSVLLAMAFDRFVAISNPRYAAILTHARIAQIGLAIITKATVILTPPVLLLKRLSFCRSRVLHHSYCFHPDVMKLSCSDTKINSAFGLTAIISTAGVDSIFILLSYALIIRSVLSIASPRERKKAFSTCISHVTAVAIFYIPLISLSFVHRFGKHALPYVPTLIANVYLLIPPVMNPIIYSVKQSSRELFSDSY

SEQ ID NO: 2169 - protein, 233 aa, Mus musculus
TIPKMLGIFWFSFRVILFGACLTQMFFIHNFTGMESAVLLAMAYDRYVAICNPLRYSTILTNKAVFMIGLGVLVRSFLSVIPFVFLILRLPFCGNNVIPHTYCEHMGLARLSCANIKVNIIYGLGAISILFFDIIAIALSYAQILRAVFRLPSREARIKSLSTCGSHVCVILAFYTPALFSFMTHRFGRNVPRYIHILLANLYVVVPPMLNPVIYGVRTKQIYDRVKKIFLQK

SEQ ID NO: 2170 - protein, 195 aa, Mus musculus
MFPLNDTQTLKFLLIGIPGLQKSHIWVSIPFPFVYLLSFLGNVIVLFFIKTEQSLHKPMYFFLSMLSISDLGLSLSSLPTTLGLFLLGIHEIHAAACFAQEFFIHLFTVTEASVLSVMAFDRYVAIHSPLKYSTILTSSRVIKIGVSLTSKNVLFILPLPFLLQRLNYCHNLLSHSYCLHQDVMKLACSDNSVVS

SEQ ID NO: 2171 - protein, 271 aa, Mus musculus
LSINYFFWPQASLFIFIFIFIFINNREEMSPLPQPKTCLLRGGASCSIILPCLLLEPAALRFRSHHVITLLLDSKIIWQNWAPPPSFITECRNSKNTLSRELCLGSFLISRSPAQPLFSSRFPKCLTRLEPRLSTGQTQHNRINVVYGLCAALSTMLDLVFIIFSYIMILKTVLGIGTPREQFKALNTCFSHICPVLIFYVPMLSAAMLHHFAKNVFPLTHILMADVFLLVPPLMNPIVYCVKTCQIREKILRKLCSKKKLIQGRRKQIKV

SEQ ID NO: 2172 - protein, 285 aa, Mus musculus
MTLSLMLASRNSSSHSTFFILLAIPGLENYQFVVFLFCVMYIVAVTGNTTILHIIHIDHTLHEPMYLFLAMLATTDLVLSSSTQPKMLAILWFHDHKIEYHACLIQVFFIHAFSSVESGVLMTMALDRYVAICFPLRHSSILTTSAVIKLGAVVMVRGLLWVSPFCFMVSRMPFCPNKVISQSYCDHMAVFKLICADTRVNHEYGLFVAFSVVGFDIIVISVSYVMILRAVLRLPSGEARLKAFGTCASHIGVILTLYIPALFTFLTHLFGHHVPLVVHIIFANV

SEQ ID NO: 2173 - protein, 319 aa, Mus musculus
  VARIANT (109)...(238): Any amino acid
  VARIANT (240)...(246): Any amino acid
MLTYNKTNVHPSTFILIGIPGLEAAHMWISIPFCMGYILALVGNSSLLFIIKTDSSLHEPMYLFLCMLAVADLVVCTTAVPKLLSLFWFHVGEIRFEACLTQVFLIHSXXXXXXXXXXXXXXXXXXXXXXXXXXXXXXXXXXXXXXXXXXXXXXXXXXXXXXXXXXXXXXXXXXXXXXXXXXXXXXXXXXXXXXXXXXXXXXXXXXXXXXXXXXXXXXXXXXXXXXXXXXXXXXXXXXFXXXXXXXTCGSHVCVILVFYTPAFFSFLTHRFGHKVAPHVHILVANMYLLVPPMLDPIIYGVRTKKIRDRFLKLFLFQRV

SEQ ID NO: 2174 - protein, 353 aa, Mus musculus
MPSFNQSSAQHHSFFFLPGIPGLELSHNWTSMSFCYAITVSGNGIILFVTITESSLPGPMHYFLSMLSFTDLGLCLSLLVTMLANIWIVVEIRLLKTIFNFFENLYIYTMPFDHMHLALPFSDIPYSTYSVWKESKRWMRRNVVVTSGQDMLLYISTHREYGYAQNLQYEWEKSCKEEKSAQCLHWPNVIYVFIFMDSSVLLVIAFEYFTVICDSLGCAVISTHSRLITVGFAHVAMRTTAPVLLLLLFKHLCFCCRHMHIQYVLIIHSVLCSVSSEGWKVLGACLSHLSAATISYMPTSVCLVQRFRKHDLPFLYISMVGVCLLIPSMNLIIHHNRHENKPLVKFSFTSYFR

SEQ ID NO: 2175 - protein, 276 aa, Mus musculus
  VARIANT (163)...(164): Any amino acid
  VARIANT (166)...(199): Any amino acid
MSIFLMSNLSTSRFVLTGFPGLEFYYILLAIPFSTVYAMVFLGNCMILHVIRTESSLHQPMFYFLAMLALTDLCMGLSTVHTVLGILWGFLQEISLDACIAQSYFIHGLSIMESSLTMSFDRYIAICNPLRYSSILTNDRILKIGVAILCVRSSMLIPPVIIXXPXXXXXXXXXXXXXXXXXXXXXXXXXXXXXXXXXXKSLQTCVSHISAVLVFYIPIIGLTMVHRFGKHLSPLVQVLMGNIYILFPPFMNPIIYSIKTQQIRVRIGRLFTLKGT

SEQ ID NO: 2176 - protein, 319 aa, Mus musculus
  VARIANT (114)...(249): Any amino acid
MALSNDSEAPISEFLLICFPNYQTWQHWLSLPLSLLFLLAMGANATLLITIRLEASLHEPMYYLLSLLSLLDIVLCLTVIPKVLAIFWFDNKSIGFSSCFLQMFVMNSFLTMEXXXXXXXXXXXXXXXXXXXXXXXXXPXXXXXXXXXXXXXXXXXXXXXXXXXXXXXXXXXXXXXXXXXXXXXXXXXXXXXXXXXXXXXXXXXXXXXXXXXXXXXXXXXXXXXXXXXXXXXXXXXXXXXXXXXXXXXXCGSHFILILFFSTVLLVLVITNLARERIPPDIPILLNILHHLIPPALNPIVYGVRTREIKQGIQNLLRRL

SEQ ID NO: 2177 - protein, 322 aa, Mus musculus
MELDPAVPALKKTLSEPGPFVLLGVAELEGLHAWFSVPMSLLYLVGMIGHLLLGVVAVDTTLQAPMYQLLGLLAAADLILATSPAPKAQAVLWGLFGEISFGGWLAQCFVVHVAFTAESSVLPAMAMDHSVSIRQPLCYGALLSQHVVGIVAAAAVTHGARVMAPPVVLLQTLPHCGHRASPHTYCEHMGVACLACDDTCPNIWFGLATTLPSPVLDLGLIDVSYALHAVSRLLCHSAHYKALGKHGTHAAGLFYKPALFSFLAYCCGLHTIPSHIHILLANLYVVVPPAMVVPPFLKPVLYGVRMQQITQRLRLVLQRVRK

SEQ ID NO: 2178 - protein, 322 aa, Mus musculus
MTQGSTTAMRGQNDSSVAEFILLGFSNYPELQRQMFGAFLVIYLVTLTGNALIMSVILLDRSLHIPMYLFLQNLSVVETGFSTTVMPEMLVVLTSEKATISFGGCFAQMYFILLFGGTECFLLGAMAYDRFAAICHPLSYPVIMNKRVFMTLVTCSWLSGTMMTTLQTIWVFSFPYCGSNEINHISCETPAVLELACTDIFFFEIYAFTGTVLIILTPFVLILLSYIRILFSILKMPSTTGRQKAFSTCASHLTSVTLFYGTASMTYLQPKSKYSPDTKKLMSLAYSLLTPLLNPLIYSLRNKEMKRAVVKLWERKVALHTT

SEQ ID NO: 2179 - protein, 290 aa, Mus musculus
QFWIGFPFFTVCLVALLGNIILLIIIPAERSLHQPMYIFLAVLAATDIGLCAAIAPKMLAIFWFRAYSMAFDACLAQLFFIHTLQCMESGILLAMAFDRYIAICDPLRHTSILTPSILGRMIVVVVIGAVVLVGLLPILIKRLHHFWSIQIAHSYCEHMAVVKLAADDVQVNKICGLFVGFSILGFDMVFIIISYALIFQAVFRLKQKEARLKAFNTCTAHIFVFLEFYILAFFSFFSHRFGHVVPSTHILLSTIYLLLPPALNPIVYGVKNMVIRKRVAQIFFLDHAHQ

SEQ ID NO: 2180 - protein, 230 aa, Mus musculus
MDKKNQTKVTEIYFSDFPQFEDGGLLLFILLLCVYLFIVVGNAVIFLAVQLDVRLHNPMYSFISIFSFLEICYTTVTIPQMLYNLVSKEKTISFIGCLLQMYFFHSFGVTESLVLTIMAIDRYVAICNPLRYAIIITPKLCTQLSTGSFTLGFLMLLPEIVWISTLPFCGPNQIHQLFCDLEPMLLLACTDTSMILVEDVIHAISILSCVSIISLSYLRIITRILKIPSG

SEQ ID NO: 2181 - protein, 316 aa, Mus musculus
MDKKNQTKVTEFYFSDFPQFEDGGLLLFILLLCVYLFIVVGNAMIFLAVQLDVRLHNPMYSFISIFSFLEICYTTVTIPQMLYNLVSKEKTISFIGCLLQMYFFHSFGITEGLVLTIMAIDRYVAICNPLRYAIIITPKLCTQLSTGLCTLGFLMLLPEIVWISTLPFCGPNQIHQLFCDLEPVLLLACTDTSMILVEDIIHAISILSCVSIISLSYLRIITVVLKIPSGESRQKAFSTCTAHITIFVLFFGSVSLMYLRFSVTFQPLLEKVIALMFAVLAPFFNPIIYSLRNKDMKKAIKEMFCSQKVRRLWEPM

SEQ ID NO: 2182 - protein, 314 aa, Mus musculus
  VARIANT (163)...(171): Any amino acid
  VARIANT (173)...(221): Any amino acid
MVIKGLQVDNWTETTHFVLLGFPSRPAFQFLLFSVFLVTYLLTLAENLLIILAIRSDGQLHKPMYFFLSHLSFLEMWYVTVISPKMLVDFLSKDKSISFNGCMTQLYFFVTFVCTEYILLAVMAFDRYVAICNPLRYPVIMTNQLCGVMAGGCWFCGLMTAMXXXXXXXXXHXXXXXXXXXXXXXXXXXXXXXXXXXXXXXXXXXXXXXXXXXXXXXXXXXIPSAQGRQKAFSTCASHLTVVTLFYSTTLFTYARPKLMYAYNSNKVVSVLYTVVVPLLNPIIYCLRNRDVKMALKKTILCNRSGSGGDGDFSS

SEQ ID NO: 2183 - protein, 315 aa, Mus musculus
MLGQNQSWVSEFILIGFSSDPTTNSILFIVFLLIYLSSVLGNGLIIMLVCLDTQLHTPMYFFLCTLSLLDMGYVTTTMPQMLVHLLAHSQTISFAGCWLQMFVFGALSITECMIFVAMSYDRYVAICYPLRYTVILNDLCIRLAAGSWICGFFSSLLNTFFTMSLPYCGPNNVNHYLCEGPSVRSLACMDTHFVEMVDLVLSVFVVVTPISLIVASYIRIAKAILKIKSTQGRCKAFSTCASHLTVVTLFYLPATYIYMRPNSSSSSERDKQISLFYTAFTPLLNPVVYSLRNKDIKRAFLKVMLYGRWIRGPQW

SEQ ID NO: 2184 - protein, 180 aa, Mus musculus
HWGLCIRLAAGSWICGFFSSLLHTFFTMSLPYCGPNRVNHYLCEGPSVRSLACMDTHIIEMVDLVLSVFLVVTPISLIVASYIRIAMAILKIKSTEGRCKAFSTCASHLTVVTFFYAPASYIYMRPNSSYSPEQDKQISLFYSAFTPLLNPVVYSLRNKDIKRAFFKVMGYDRCASGPGW

SEQ ID NO: 2185 - protein, 323 aa, Mus musculus
MARGNQTSIFEFLLWGLSEQPQQQHILFLVFLWMYLVTVAGNLLIVLAISTDVRLHTPMYFFLASLSCDDILLVSTIVPKALVNIHTQSRTISYAGCLVQLYFFLTFGDMDIFLLATMAYDRFVAICHPLHYRMIMSFQRCSLLVTVCWILTTVVAMTHTFLIFWFSFYSKKVIPGFFCDLEPLIKIPCSETRINELVLLFLGSAVVFILLLLILVSYIQIVSAIFRVPSAQGRHKAFSTCGSHLSVVALFFGTVIRAYLCPSSSSSNSVVEDTAAAVMYTVVTPLLNPFIYSLRNKDMKGALVRILKGKVPFSWAQGLLQKK

SEQ ID NO: 2186 - protein, 349 aa, Mus musculus
  VARIANT (132)...(222): Any amino acid
MARGNQTSTFEFLLWGLSEKPQQQHILFLVFLWMYLVTVAGNLLIVLAISTDVRLHTPMYFFLATLSCVDILFTSTTVPKALVNIHTQSRTISYAGCLVQLYFFLTFGDMDIFLLATMAYDRFVAICHPLHYXXXXXXXXXXXXXXXXXXXXXXXXXXXXXXXXXXXXXXXXXXXXXXXXXXXXXXXXXXXXXXXXXXXXXXXXXXXXXXXXXXXXXXXXXXSLCFSSWGVQSSSPFLLILMSYIRIVSAILRVPSAQGRRKAFSTCGSHLSVVALFFGTVIRAYLCPSSSSSNSVVEDTAAAVMYTVVTPLLNPFIYSLRNKDMKGALVRILKGKVSFSWAQGLLQRK

SEQ ID NO: 2187 - protein, 310 aa, Mus musculus
MKEENESFTTDFTLLGVTRHREQEYFFFILFLFLYPITVIENVLIILAIHSDTRLHNVMYFFLANLSLVDIFFSFVTIPKMLANHLLGRKAISFGGCMSQMYFMISLGNTDSYILAPKAYDRAVAISCPLHYATIMSSRPVLLVAGSWVIENANVLPHTLLTAYIALCGNKDVANFYFDIMPLLVSCSDICFNVKMMYLGVGVFSVPLLSFISYVPVFSIVLRVPCTTGFLKALSTCGSHLTVVSLYYGTVMGMYFRPLTSYSLKHALITVMYTAVTPMLNPFIYSLRNRDMKAALRKLFHCPSSSSSLM

SEQ ID NO: 2188 - protein, 309 aa, Mus musculus
MREENESSTTDFTLLGVTRQREQEYFFFILFLFLYPITVIENMLIILAIHSDTHLHNTMYFFLANRSLVDIFSVTIPKMLANHLLGRKAISFGGCMSQMYFMLSLGNTESCILASVAYDAVAISCPLHYPTIMSPRPCVLLVAGSWVIANANVLPHTLLTARLSFFGNKDVANFYCDIIPLLQMSCSDICFNVKMMYLGVRIFPVPLLCIIISYVRVFSTVLRVPSTKGLLKDLSTCGSHLTVMFLYYGTVMVMYFKHLTSYSLKHTLIIVMYMTVTMLNPFIYSLRNRDMKAALKKLFHCPSSSSSIM

SEQ ID NO: 2189 - protein, 348 aa, Mus musculus
MKEENESFTTDFTLLGVTRQREQEYFFFILFLFFYPITVIENVLIILDIFFSSATILKMLANHLLGSKAPSISFGECRAQMTFMTSLANTDSCILAAMVYDRSVAISCSLHYATIMSLLCALLDAGSWVIKANMLPHTQLTARLSFCGNKDVAIFFFFFFFFFDTGFSVPWLSWNSFCRTGPTQKSACLCLISAGIKGVCHHCLACGNFYCDNMPLLQLSCSDICFNVKMMYLGVGVFSVPLLYIISYVRVFSTVLRVPSTKGFLKALSTCGPHLTVVSLYYGTVMVMYFRPLTSYSLKHTLIIVMYTAVTPMLNPLIYSLRNRDMKTALKKLLHQMQTLLHMPARFC

SEQ ID NO: 2190 - protein, 307 aa, Mus musculus
MENKTEVTQFFLQGLASDPGLQLPLFIIFLLIYTITLVGNLGMILLIVLDAHLHSPMYIFLGNLSLVDFCYSSGVTPKVMAGFLVGDKVMSYNDCAAQMFFVTGFATVENYLLASMAYDRYAAVCKPLHYASTMTTSMCIWMIAGCYACGFLNACIYTGDAFSLSFCKADVVHHFFCDIPAVMVLSCSNKHINELVLVCVASFNIFFALIIILISYLMIFITIIKMHSASGHQKAMSTCASHFTAVFIFYGTVIFMYLQPSSSHAMDTDKTVSVFYTMVIPLLNPLVYSLRNKEVKSAFRKIIFRPK

SEQ ID NO: 2191 - protein, 307 aa, Mus musculus
MENGTEMVRFILMGLTDDPDLQLPLFITFLLIYIITLVGNLGLILLILLDSQLHTPMYIFLSNLSLVDFCYSSTVTPKVMAGFIIGDKMMSYNACASQMFFFANFANVENYLLASMAYDRYAAVCKPLHYATTMTTRVCACLVISCYICGFLNASIYTVNALYLTFCELNVVHHFFCDIPAVMIASCSHRHANDMVLISVASFNIFFALILILISYTFIFTNILKMHSNSGYRKALSTCASHFTAVSIFYGTIIFMYLQPRSSHSMDTDKIASVFYTMVIPMLNPLVYSLRNKDVKSAFTKIVLRSR

SEQ ID NO: 2192 - protein, 317 aa, Mus musculus
INLVENISEVTEFILVGITDAPELLIPLFIIFTLIYLIALFGNLGMIMLILLDSRLHSPMYFFLCNLPLVDCVYASAITPKVMEGFLTGNKIISYNACGAQMFFFVAFGAIESLILASMAYDCQAGAKLLHYTTIMTSSTCILIVTCCYMCGILQSSVHVALAFCLFFCHSNMINHFSCDIPPLLEISRSDTHTNGITPLILATLDLVFTLLVILNTYLLIFIAILRMHSAEAQRKDFSTRVSHLITASIFFGSLIFMYLQPSSSHSPEADKIASVFYTMVIPIMFNPVAYSLRNIEDKCAFKKVVGKLRTSLHSVN

SEQ ID NO: 2193 - protein, 310 aa, Mus musculus
  VARIANT (235)...(261): Any amino acid
MENISEVTEFILVGLTDAPELQIPLFIIFTLIYLIALFGNLGMIILILLDSRLHTPMYFFLCNLSVVDCVYASAITPKVIEGFLTGSKTISLNGCAAQMFFFVAFIAIESLILASMAYDRHAAVCKPLHYTTIMTSTTCILIVTCCYMCGILQSSVHVALAFCLSFCHSNVINHFFCDIPPLLDISCSDTHTNEITLLVLATLDVVFTLLVILNTYLLIFIAILRMRSAEAQRKXXXXXXXXXXXXXXXFXXXXXXXXXXXMDTDKIASVFYTMVIPMLNPVVYSLRNKEVKNAFKKVVERLMSSFHLVH

SEQ ID NO: 2194 - protein, 293 aa, Mus musculus
  VARIANT (202)...(215): Any amino acid
MGNNTDVTHFLLLGLTDDPELQLPLFMIFLIIYTITLVGNLGIILLIFLDSSLHSPMYFFLGNLSLVDFCYSSDVTPRVMTGLLIGDKVISYNGCAAQMFFFVAFATVENFLLASMAYDRYAAVCKPLHYATTMTSGVCVCLSIGAYTCGFLIASIHIGDTFSLSFCGSNVVHHFFCDIPAVMILSCSDRHVSELVLFYVGXXXXXXXXXXXXXXVELISLIIVFCHLPIKFQNGFHISACQHRSIEKGLYIQEIMRIFLSFKNTSVKIMCILFWMICMSSYSQDNVEKDFKN

SEQ ID NO: 2195 - protein, 308 aa, Mus musculus
MENNTEVTHFLLLGLTDDPELQLPLFMILLIIYTITLVGNLGKILLIFLDSCLHTPMYFFLGNLSLVDFCYSSDVTPKVMSGLLKGDKVISYNGCAAQMFFFVAFATVENFLLASMAYDRYAAVCKPLHYATTMTSGVCVCLSIGSYACGFLIASIHIGDTFNLSFCRSNVVHHFFCDIPAVMILSCSDRHVSELVLFYVGSFSIFFLLSLVICISYIFIFITIFKMHSNAGYGKAVSTCAAHFTAVSIFYGTGIFMYLQPSSSHSMDTDKITSVFYTMIIPMLNPLVYSMRNKEVKRAFTNVFHKAK

SEQ ID NO: 2196 - protein, 289 aa, Mus musculus
  VARIANT (151)...(154): Any amino acid
  VARIANT (156)...(157): Any amino acid
MTPLKNWTEVTHFLLLGLTDDPGLQLPLFIIFLLIYIFTLVGNLGLILLILLDSRLHTPMYFFLGNLSLVDVFYSSAITPKVMAGLLLGDKIISYNSCAAQMFVFATFATVENYLLASMAYDRYAAVCKPLHYATTMTPSVCMCLIMGCYXXXXFXXFCDMPALMALSCSDRHINELVLIYLASFTLFFALIIILVSYTIIFITILNMHTGAGLQKAISTCASHFIAVFIFYGTTIFMYLQPSSRHSMDTDKIVSVFYTMVIPMLNPLVYSLRNKEVKSAFMKWILKEK

SEQ ID NO: 2197 - protein, 314 aa, Mus musculus
MKKNIEESEFILLGLTKSPELQVLLLMILTFIYAITLTGNLGMFLLILLDAHLHTPMYFFLRNLSLVDFGSSSTVTPKVMAGLLTGSNVISYNTYAVLMFFFVFFATVDSYLLASISMAYDGYAAVCKPLHYTTTMTKGVCTCLAISSYIFGILNASIQIIFGLPFCGYNVINHLFCDIPAVRILACSDKHVNEMILILVSSFHIIFVFLVILISYLLIFLYILKMHSSEGYHKAFSTCASHVTAVFTFYGTVTIVYLKPSANHSIDTDKFVSVIYTMVIPMLNPMVYSLTNKEVKNALKNIFQKAKLYVYMLY

SEQ ID NO: 2198 - protein, 369 aa, Mus musculus
MTMMENRTEVTQFILSRLTDDPSLQLPLFITFLLIYILILGMILLFILDSWLYIPMYFFLGNPSLGDLSYSSYITPKVMDGSLIGDNVSLSYNDCADQMFFAAGFASVENYLASAGYDCYAKLCKLLHHATLITKGVFVYIIINCYIFDFMKDFFVVVFLRQGFSVPLSWNSLCRPGWPQTLKSTCLCLPSTGIKGVCHHCLSMNEFLFIGDTLYQFSFYFCKFNVIYHLFFYMPAIMYVSSDRHVNELVSVCLASFNIFFCSHNYLLSHIIIFIGILRMHSGTGHQKSISTCASHIIPVTAFYGTLIFMYLQSSSSHAMNTDKTVSVFYTMVIPMFNPVVYSLRNKIKVAFRKIVLMEKKLFVYNFNI

SEQ ID NO: 2199 - protein, 312 aa, Mus musculus
MIKERNFTEITEFILLGFSDFPQITALLFVMFLILYITTLTWNLSLVVLIRMDSYLHTPMYFFLSNLSFIDICYISSTVPKMLSNLFQEKQTISFVGCIVQYFMFATMGLSESCLMTAMAYDRYAAICNPLLYSSVMSPTLCAQMVMGSYTAGIMGSLSQVCALLQLHFCGPNVIRHFFCDMPQLLNLSCTDTFFAQVVLLILTMLFCISNALVIIISYGYIVLSILKITSAKGRSKAFNTCASHLTAVSLFYTSSAFVYLSSSSGGSSSFDRFVSVFYTVLIPMLNPLVYSLRNKEIKDAGKRLQKKLGCC

SEQ ID NO: 2200 - protein, 319 aa, Mus musculus
MAGGRNSTVVTRFILLGFSDQPQMKIFLFMLFLGIYILTLAWNLSLITLIRMDSHLHTPMYFFLSNLSFLDICYSSSTAPKMLSDIVTDKNTISFLGCATQYFVFCGMGLTECLLLAAMAYDRYTAVCNPLLYMALMSHTLCLKLVAGAYMGGFLSSLIATCSIYQHDFCGPNIINHFFCDLPPVLALACSDIFTSQVVTFILGVIVGVMSVLVVLISYGYIIAAVLRINSAKGRTKAFSTSASHLTAVTLFYGSGLFMYMRPNSSYSLGQDKVASVFYAVVVPMMNPIIYSLRNKDIKNAVRKAVERDSMLSHGYSFF

SEQ ID NO: 2201 - protein, 294 aa, Mus musculus
  VARIANT (158)...(164): Any amino acid
VIIYPVFTELVCPSPLDEKLSREAILFAYMMLSTPPLYVISKISLSPTAFIPSSLSHASCSFYAGKARAQNCCRENFGFFKNTDKLSEYIFVSIPDVGYWGASGCPHQLTTLSSALAGVSYLPAEDSLCLEFWGLLREFENTNAEGLAAVVPLQVLLXXXXXXXPLSCSDPFISQLVLFLAALFVGFGSFLVIIFSYVFIAVSILKVASFKGRVKAFKTCGSHLAAVTLFYGTVFSVYMHHSSQHSTKQDKVLSVVYTILIPMVNPLIYSLRNTEIKEALKRVLKKAAHLPQKA

SEQ ID NO: 2202 - protein, 302 aa, Mus musculus
FSWGFPGSWEEQIFLFVLFLVFYVLTLLGNGAIICAVRCDSRLHTPMYFLLGNFAFLEIWYVSSTTPNTLANILSKTKTISFSGCFLQFYFFFSLGTTECFLLTVMAYDRYLAICRPLHYPTIMTRRLCCILVSSCWLIGFLGYPIPVFSISQLPFCGSNIIDHFLCDMDPLMALSCVPAPITKLMLYVQNSLFLFFTIAYILQSYILLLKAIFQVPSAAGRRKAFSTCGSHLVVVSLFYGTVMIMYMSPTYGISTLMQKILTLVYSVMTPLFNPLIYSLRNKDMKLALRKVLLGMRIVKNI

SEQ ID NO: 2203 - protein, 318 aa, Mus musculus
  VARIANT (177)...(183): Any amino acid
MKTLNSPSNSSTITGFILLGFPCPREGQILLFVTFFVVYLLILMGNASIICAVYCDQRLHTPMYLLLANFSFLEIWYVTSTVPNMLANFLSDTKVISFSGCFLQFYFFFSFGSTECFFLAVMAFDRYLAICRPLHYPSLMTRHLCNTLVISCWVLGFLWFPVPIIIISQMSFWWVQXXXXXXXIIDHFLCDPGPLLALACSRAPLMEVFWTIIMSILLVIPFLFIMGSYILVLRTVFRLPSRDGQKKAFSTCGSHVTVVSLFYGSVMIMYMSPTSGHEAGMQKIVTLFYSVGTPLLNPVIYSLRNKDMKNALQKILRT

SEQ ID NO: 2204 - protein, 142 aa, Mus musculus
MNVSEGSTVTYFVLLGFPGPWKIQITLFSLILLLYMITLTGNMAIICAVRWNQQLHTPMYMFLANFSFLEIWYVTCTVPNMLVNSLSKTKTISFTGCFTQFYFFFSLGTTECFFLCAMAYDRYLTICYPLHYPSIMTRQFCS

SEQ ID NO: 2205 - protein, 304 aa, Mus musculus
  VARIANT (81)...(90): Any amino acid
MNSSSTSDFILLGLSTNPWMQKPLFGIFIIMYLVTVMGNVLIILVIRSDSRLHTPMYFFLSNLSFMDICFTTVIVPKMLVXXXXXXXXXXCLVQMYFFLALANTDSYLLASMAIDRLVAICNPLHYDVVMRSQRCLLMLLGSCTISHLHALFRVLLMSRLSFCASHVIKHFFCDTQPVLKLSCSDTSSSQIVVMTETLAVIVTPFLCILFSYMKIIVTVLRIPSAAGKWKAFSTCGSHLTVVALFYGSVIYVYFRPLSMYSVVKDRIATVMYTVVTPMMNPFIYSLRNKDMKRGLRKLKDRLHS

SEQ ID NO: 2206 - protein, 297 aa, Mus musculus
  VARIANT (255)...(285): Any amino acid
MLRENQSHMTEFLLLGLTSNPKQQVWLFASFLAMYLVNVIGNSVIIASIQRDARLHTPMYFFLSNLSLVDICFTTVIVPQMLVNLLTQRKTILFAQCLTQMYFFVAFGITDSFLLAAMAIDRYVAICNPLHYNTVMSPRRCRLLVVASWAVSHLHSLTHTILMGRLSFCGPNVIHHFFCDVQPLLTLSCSDTSINELLAFTEGSVVIMSPFSLLGGSYIYITRTVLRVPSGEGRDKVFSTCGSHLTVVALVYGTXXXXXXXXXXXXXXXXXXXXXXXXXXXXXXXMKQALRKLAKRT

SEQ ID NO: 2207 - protein, 165 aa, Mus musculus
MKFTEIRAEDNASTVTEFLLLGFSDLPNLQGILFGMFSIIYLIILVGNSFIIVITRIDPALQKPMYFFLANFSSLEICYVSVTLPRILFSIAAQERKISVLSYATQLCFFLMLGATECFLLAVMSYDRYVAICNPLHYPLVMNPTKCTQLAAASWLGGIPVQIGQ

SEQ ID NO: 2208 - protein, 143 aa, Mus musculus
KFTTSTDEDLFKQEKLNASTLMEFTLLGFSNVPHLQVLFMVFLFMYMTILLWNSIIIVLAKTDPALQTPIYFFLSNFSFLEICYVTVTIPRMLMDLYTLKGNISVFACATQMYFVLMLGATECLLLAAMAYDRYVGYLPPSPI

SEQ ID NO: 2209 - protein, 164 aa, Mus musculus
  VARIANT (131)...(137): Any amino acid
MQSKYVNLQRANKFKITDTNLSVPIEFVLLGFSDIPQLHWFLFGIFFFIYMSILLGNGLIILITRVEPTLQTPMYFFISNLSFLEICYVSVTLPRMLMDLFTLKGNISFLACATQMCLFLILGGTECFLLXXXXXXXMMICAYCVLCFVQLICLGGLLHSGIQK

SEQ ID NO: 2210 - protein, 297 aa, Mus musculus
AREIAPSLDEFIFLGITNNPFITLLLVYLINLLANLGMIILTRVDTQLHTPMYFFLRHLSFCDLCYSTAIGPKMLVNLLAEEKFISTGGCALQFFTLCAFVDSECLLLAVTAYDRYQAISNPLLYTVNMFSRLCSLLMAGVYLVGTADTLIHTTLAFSLCFCDINQFFCDVPSLVLISCSETEVNEAISTILFIELNIISGLLVSYCYIISSVFKICSADGSFKAFSTYASHLTVAVFLGTLLFMYFHLNSSYFLDQDKITSLFYTLVILMLNPLISLRNDMKEALEGWDGSVGKST

SEQ ID NO: 2211 - protein, 301 aa, Mus musculus
TRTRITEVILLGFQVDPFLEMLLFGLFLLFNCLTLMGNGIILGLICLDARLHTPMYFFLSHLAIVDMSYASSTAAPKMLTNMVMHQKSISFASCILHTFLYLAFAVTECLILVVMSYDRFVVICHPLKYTLIMSWRVFVILAATCWVFSFLLALTHTTLILRLPFCGPQNVNHFFCQIMSVFRLACADTRLNVILFAGSVMVLLGSLCLVLVSYTRILVAILGIHSGGLRKTFTRSSCLCVVGLFFGCAIAKYLAHKSNHSQEERKILSLFYSLFNPMLNPLIYNLRNTEVKGALRRALWT

SEQ ID NO: 2212 - protein, 301 aa, Mus musculus
MNQTWITEVILLGFQVDPSLEMLLFGLFLLFYCLTLMGNGIILGLICLDARLHTPMYFFLSHLAIVDMSYASSTAAPKMLTNMVMHQKSISFASCILQTFLYLAFAVTECVILVVMSCDRFVVICHPLKYTLIMSWRVFVILAATCWVFSFLLASLHTKLILRLPFCGPQNVNHFFFCQIMSVFRLACADTRLNVILFAGSVMVLLGPLCLLLVSYTILVVILGIHSREGRRNSHLCVVGLFFGCAISMYMVPSKHSQEQRKILSLFHSLFNPMLNPLIYSLRNTEVKAALRSVLWKQRSL

SEQ ID NO: 2213 - protein, 313 aa, Mus musculus
MVPMERNVSVEIIFSLLGFTDYPELQIPLFLIFLFMYVITVVGNLGMIALININPKFHTPMFFLSHLSFVDFCYSTIITPKLLENLVLADKTILYFSCMFQYFLSCVAVVSESYLLAVMAYDRFVAICNPLLYTVAMSPRLCILLVTGSYIWSIFAPLILLCYALQLKFSRFNVINHFFCEYTALIAVSSSDIHIPSLLLFCFATFNEVSTLLIILTSYVFIFVTVLKIKSASGRRKAFSTCASHLTAITIFHGTILSLYCIPNSKNSRQVVKVASVFYTVVNPMLNPLIYSLRNKDVKDAFQKLVSTKIPLQ

SEQ ID NO: 2214 - protein, 316 aa, Mus musculus
MNHEELESIDNVSTVIQFVLIGFSDLPNLQGFLFAVFSVVYIIILIGNFLIIIIISMDQALQKPMYFFLANFSSLEICYVSVTVPRILFNIGTQNRSISLMSCATQMSFFLVFGTTESLLLAVMSYDRYVAICHPLLYPLIMNPTKCKQLAAVSWLGGMPVQIGQTCQIFSMNFCNSYKINHFFCDIPPILKLACGDTSVHELSVYVVLMVVAAFPFILVLASYSKIIATILRLPTAKGRAKAFSTCSSHLMVVLLFYGSATVTYLRPKSMHSPGTDKLLSLFYTVVTPMFNPLIYSLRNKEVISALRKLLFKTYY

SEQ ID NO: 2215 - protein, 310 aa, Mus musculus
MEVGNCSATEFLFLGITNNPVIKVILFTTFLIVYLIILIENLGMIILIRMNHQLHIPMYFFLSHLSFSDVCYSSAVGPKMLLDLLAKSSNSITFLGCVLQFFIFCIFTDVECMLLAMMAFDRYKAISNPLLYAVDMSSKVCYQLLAVVYTVAIVDAVVHTTLTFRLCFCGSKEINHFFCDLPPLYMLSCSDIQVNELALFTVFGFIELSTISGVLVSYCYIILSVLKIRSAEGRFKAFSTCTSHLTAVAIFQGTMLFMYFRPSSSYSLDQDKMTSLFYTLVIPVLNPLIYSLRNKDVKEALQKLKTKTWF

SEQ ID NO: 2216 - protein, 307 aa, Mus musculus
MKQEELESIDNVSTVIQFVLLGFSYLPILQEFLFAVFFVVYIIILIGNFLIILVTSMDSALQKPMYFFLANFSSLEICYVRILFDIEKQDRRISLMSCATQLCFFLVFGTTECLLLAVMSYDRYVAICNPLHYPLVMNPTKCTQLAAGSWLGGIPVQIGQTCQIFSMHFCNSNQIEHFFCDIPIILKLACGNTVHELSVYVEGVVAAFPFILVLTSYSKIIAMILRLPTAQGRAKAFSTCSSHLLVVLLFYGSAAVTYLRPKSMHSPVTDKLISLFYTTMTPMFNPLIYSLRNKEVIAALRKLILKK

SEQ ID NO: 2217 - protein, 232 aa, Mus musculus
MDKENCSSLPEFFLLGISSKYGVKVVLFVVFLLVYLTTLLENIGMIALIRMDPQLHTPMYFFLSHLSFSDLCYSTAVGPRMLVDLVAEKHSIPFTGCFLQLLFVYVFIDVECMLLAVMAFDRYKAISKPLLYSVDMSSKVCYQFLTLIYLTSTIDGLIHTTLAFNLCFCGSTQINHFFCDLPPLYLLSCSDTQANELVVFTLFGFIELSTISSVLVSYCYIISSVLKISSAG

SEQ ID NO: 2218 - protein, 310 aa, Mus musculus
VKQEELESIYNVSTVMQFVLLGFSDLPNLQGFLYALFFVVFIIILINFLIILVTCMDPALQKSIYLFLAYFSSLEICYVSVTLPKTLFCIEMQYRTISLMPCAIQLCFFLIFGSTECFLLTGMYYDRYMSICNPLHYPLVMNPKNCKELAAVSWFGGIPVQIVQTYQVFSMRFCNSNQIYHFFCDIPPILKLACGDTSVHELPVFVVVSVVVALPFILLLTSSSKIIATILRLPTAKGRARAFSTCYSHLLVVLLFYGSATVTMRPTSLCSSRTDKLFSLFYAVVIPMLNPLIYSLRNKEVTAALRKLIL

SEQ ID NO: 2219 - protein, 232 aa, Mus musculus
LESIDNVSTVMQLVLLGFSDMANLQGFLYAAFIVVYIIVLVGNFHIILVTSMDTAFQKSMYFFLAIFSSLEICYVSATDCISIVQIVQTYQIFSMHFCNSNQIYHFFRDIPPILKLPCEDTSVHELPVFVVVSVAFALPFILVVTSSSKIIATILRLPTAKGRARAFSTCYSHLLMVLLLWICYSYRPTSLCSSRTDKLFSLFYAVVIPMLNPLVYSLRNKEVTAALRKLIL

SEQ ID NO: 2220 - protein, 246 aa, Mus musculus
LCYTAVVVPHILANNFQSEKTISLLSCATQMVFLIGLGSADCFLLAIMAYDRYVAICHPLQYPLIMTITLCVRLVVASVVIGLFLSLQLVVFIFCLPFCQDRGIEHFFCDAPPLMRLVCATSHIHELSVLMAATLAIAVPFFFIATTYALIVAAVLKLHSAAGRHRAFNTCSSHLTVVLLQYGCCAFMYLRPVSSYHPKQDQFVSLVYTLGTPFLNPLIYTLRNSEMKGAIGKVLTRKYLSWKMIG

SEQ ID NO: 2221 - protein, 279 aa, Mus musculus
  VARIANT (151)...(157): Any amino acid
MAKVNLTLVTEFLLIAFTEHPEWGLPLFHLFLFIYLFTLLGNSGMIVLIRMDRRLHTPMYFLLSHLSFMDICYSSVTVPQTMAVLLEHGAALSYARCVAQFFLFTFFGSIDCYLLALMAYDRYVAVCQPLLYVTIMTQKALLSFVVGLTLXXXXXXXGESYIQELVIIVFAIFVIPCSMVVIVVSYLFIIVAILRIPSAGGRAKTFSTCASHLTAVSLFFGTLIFMYLRDNSGQASEKDRVVSVFYTTVIPMLNPLIYSLRNKEVKEALKNFLNRVKTF

SEQ ID NO: 2222 - protein, 292 aa, Mus musculus
LFVLVLISYLLTLVGNTAIILVSCLDSALQTPMYYFLTNLSFVDICFSTSIVPQLLWNLHGPAKTITATGCAIQLYVSLALGSTECVLLAVMAFDRYAAVCRPLHYATVMHPRLCQSLAGVAWLSGVGNTLIQGTITLRLPRCGNHKIYHFICEVPAMIKLACVDIHANEVQLFMASLVLLLLPLTLILVSYGYIAQALMRLRSALTWGKALGTCGSHLIVVVLFYGTSTAVYIHPNSSYAQSQGKFITLLYTVVIPTLNPLIYTLRNKDVKGALKRLVRKDSSTGKKILSR

SEQ ID NO: 2223 - protein, 321 aa, Mus musculus
MIVENITTMSGFLLMGFSDNHELQILQALLFLVTYLVGSAGNVIIITITTLDPQLQSPMYYFLKHLSILDLSSLSVTVPQYVDSSLAQSGYISYAQCMLQIFFFTAFAWGELAILTVMSYDRYVAICLPLHYEVIMSPRKCTWAVATVWLSGGISGTLYITGTLFIRFCGDKIIHQFFCDVPQLLKLSCSNDHLVIMDMVSFLTAVSFACFTGIVISYVHIFSTVLRMPSAESRSKVFSTCLPHLFVVSLFLSTGAFAYLNLTSDSSTALEFLLSIFYTVLPPTLNPVIYSLRNETIKNVVRKLLLSTKFTVRIIFFSCCF

SEQ ID NO: 2224 - protein, 290 aa, Mus musculus
  VARIANT (92)...(124): Any amino acid
MEGKNQTAPSEFIILGFDHLNELQYLLFTIFFLTYICTLGGNVFIIVVTIADSHLHTPMYYFLGNLALIDICYTTTNVPQMMVHLLSEKKIXXXXXXXXXXPXXXXXXXXXXXXXXXXXXXXXXGFLNSVLHTVLTFHLPFCGNNQINYFFCDIPPLLILSCGDTSLNELALLSIGILIGWTPFLCIILSYLYIISTILRIRSSEGRQKAFSTCASHLLIVILYYGSAIFTYVRPISSYSLEKDRLISVLYSVFTPMLNPIIYALRNKDIKEAVKAIGRKWQPPVFSSDM

SEQ ID NO: 2225 - protein, 320 aa, Mus musculus
MSINCSLWQENSLSVKRFAFAKFSEVPGECFLLFTLILLMFLVSLTGNALIALVICTNPSLHNPMYFFLANLSLLEIGYTCSVIPKMLQSLVSEAREISREGCATQMFFFTFFGITECCLLAAMAYDRCMAICSPLHYPTRMSSGVCAHLAIVSWGMGCIVGLGQTNFIFSLEFCGPCEIDHFFCDLPPVLALACGDTSQNEAAIFVAAVLCISSPFLLIIYSYVRILVAVLVMPSPEGRHKALSTCSSHLLVVTMFYGSASITYLRPKSSHSPGMDKLLALFYTAVTSMLNPIIYSLRNKGSKGSTEKNTESEETSGNK

SEQ ID NO: 2226 - protein, 206 aa, Mus musculus
MSYDRYVAICLPLHYEVIMSPRKCTWAVAAVWLSGGISGTLFTASTLSIRFCGDKIIHQFFCDIPQLLKLSCSNDDFGVLEVSIFMAVMAFACFMGIAFSYGQIFSTVLRMPSAEGRSKVFSTCLPHLFVVSFFLSTGSCAYLKPTSDSPTASDLMLSIFYTVLPPTLNPFIYSLRNKSLKEAVKKLLLSEELVGKIYVCSVFSAC

SEQ ID NO: 2227 - protein, 311 aa, Mus musculus
MRSDNDSTVSELILLGLPIQAEDQGMYCALFLTMCLTTVLGNLIIILLIRLNFHLHTPMYFFLSHLAFTDISFSSVTAPKMLVNMLTHSQFISYVGCIFQLYFLSTFTDLDSFLLTSMAYDRYVAICHPLHYTIIMSQNLCILLVVVSTLSSANSLVYTLLLARFSHFRNNTTPHYFCDLSALLKLSISDTTINELVIFPLGTVVIALAFICILVSYGRIGITILKTPSIRGICKALSTCGSHLTVVSLYYGAITGLYLVPSSNNTNDKDVIVAVIYSLVTPMLNPFIYSLRNQDMKKSIEKYSEQETVFT

SEQ ID NO: 2228 - protein, 177 aa, Mus musculus
MRRDNESTVSEFILLGLPIRAEDQDMYSAPFLAMYLTTVLGNLLIILLIRLDSHLHTPMYFFLSHLAFTDISFSSATAPKMLRNMLIHSHFISYAGYVSQVYFFTFLRSIDSFLLMSMAYDRYVAICHPLHYTIIMSQSLCVLLVAMSWTLSFFNIFFIRYFSHLHFPMLCQNSHIP

SEQ ID NO: 2229 - protein, 314 aa, Mus musculus
LRATKNKTEVTEFVLLGLSSRPEMQPVIFGVIYLTAVLGNTLLVLVVCSDPKLQTPMYFLLSQLSLIAICLTTITVPQMLVHTLSAVRNISYNCCMTQLFFFMAVGSMEGHLLADIADYYVAICDPLRYYAIVSHSLCLQITLTSWVMVSLNSLLYSVLVTRLTFCGNKVTHFFCDITPLLKLSCTRPVLNEMLIFTEGAAVVGSPFFLIWGSYARIGIAMAHMHSFAALKKALSTCSSHILIVLLLFGSLARMYLKPSSSYDLDQDHQVAIFYMLISPMLNPLIYSLRNQDVKGALWRLFRKLHTSDWLLEKQ

SEQ ID NO: 2230 - protein, 170 aa, Mus musculus
LTIMAQDRYVAICKPLLKTFQLSFCHSNVVPQFFCDIPSLLRLSCSDTFNNKLLILLSAILVSGSCFVFIVISYVRILSTVLKVPVKGERGKAFSTCVPHIIVVSVFLSSAAYIYLKPPVVTLEVAKEMTLSVFYTIVPPFLNPIIYSLRNRQIKKAVSKLISRIFFLIM

SEQ ID NO: 2231 - protein, 317 aa, Mus musculus
MPNDTRVTGFILMGFSAAPELQTVCGLFFLVMYLAVIMSNLLIITVITLDLKLQTPMYFFLKNLSLLDVFLVSIPIPKFIINNLTHNNYISILGCAFQILLMTSFSAGEIFVLTAMSYDRYVAICSPLCYEAIMSSGNCVLMVGVSWATGILFGALYTAGTFSMPFCGSMVIPQFFCDVPSLLRISCSGSLMIIYISLGIGMCLCMSCFYCVMISYFYIISTVLKIPTTRGQSKAFATCIPHLTVFSVFIATACFVYLKPPSDIPSITDRLFSVLYTVLPPALNPVIYSLRNSDVKCSLRRLQQNLCPRDSYYLTVQ

SEQ ID NO: 2232 - protein, 313 aa, Mus musculus
MHFQTMANTSIVTEFFLEGFCTWELRVLLSVLFLLVYLCSLLGNITIIIVTTVDQTLKTPMYFFLRNLSILDMCYISITVPSACINSLTDHRNISVAGCAAQIFSFLFCALVEIFFFFMAQDRYVAICKPLLYPVIMNHQFCVQMTLASLLSSLVIASVHTFKTFQLSFCHSNVIPQFFCDLPALLRLSCSDTFNNNLLILPTDIGVSGSCFVFIAISYIRILSTVLKIPIKRERGKAFSTCVPHIIVVSVFVSSAAYVYLRPPVITFEVVQEMIVSVFYTMVPPFLNPIIYSLRNKQIKEAVRKVMSQVFPI

SEQ ID NO: 2233 - protein, 325 aa, Mus musculus
  VARIANT (19)...(25): Any amino acid
MTNHTMVTEFILTGHPNRXXXXXXXLLGIPETEGLENVLLFLFSTLYACALLGNLLLLTAVISSPQLHTPMYFFLGNLSIFDMGFCSTTAPKMLSYLSGQGGGISFQGCVVQHFFYHCLGCTECFLYTVMAYDRFVAICFPLRYTIIMNHRVCCVLATGTWMSGCVHATILTCLTFQLPYCGPSNVGYYFCDMPAVLPLACEDHSLAQRVGFTNVGLLSLICFFLILVSYTRIGISISKIRSTEGRQRAFSTCSAHLTAIICAYGPVIVIYLQPNPSPLLGAVIQILNNLVTPTINPLIYSLRNKDVKAALRHVFLKRSLSLESK

SEQ ID NO: 2234 - protein, 254 aa, Mus musculus
  VARIANT (91)...(145): Any amino acid
MIAGNYSMVTEFILAGLTSTPELQLPLFFLFLGIYAVTMVGNLGMITLILLSSHLHTPMYFFLSSLSFIDLCHSTVITPKMLVNFVTVKNXXXXXXXXXXXXXXXXXXXXXXXXXXXXXXXXXXXXXXXXXXXXXXXXXXXXXXXFSAFNILFPTLSILSSYIFIIASILRIKSTEGRSKAFSTCSSHISAVAVFFGSAAFMYLQPSSVSSMDQGKVSSVFYTIVVPMLNPLIYSLRNKDVKVALTKFYEKSFS

SEQ ID NO: 2235 - protein, 265 aa, Mus musculus
  VARIANT (77)...(80): Any amino acid
  VARIANT (82)...(83): Any amino acid
MGEDNRTSVTEFIFLGLSQDPQTQVLLFFLFLFIYLLTVLGNLLIIVLIHSDPRLHTPMYFFLRNLSFADLCFSTTXXXXFXXCLQPLHYSTIMYTRVCVQLAAGSWASGALVSLVDTTFTLRLPYRGNNVINHFFCEPPALLKLASADTYSTEMAIFAMGVVILLAPVSLILTSYWNIVSTVIQMQSGEGRLKVFSTCGSHLIVVVLFYGSGIFAYMRPNSKIMNEKDKMISVFYSAVTPMLNPIIYSLRNKDVKGALKRITTK

SEQ ID NO: 2236 - protein, 268 aa, Mus musculus
LVVLVIEDSRLHNPMYYFLTVLSSLDACFSSVLTPKMLANFLSKNKSISFAGCATQMLLFVTFGTTECFLLAAMAYDRYLAIYSPLLYAVRMSPRVYVPLIIASYTGGILHATIHTVATFSLSFCGSNEIRHVFCDIPPLLALSCSDTHLNQLLLFYCAGSIKLITILIVLVSYGFVLLAILKINSAEGRRKIFSTCGAHLTGVSIFHGTILFMYVRPSSNYTLEQDMVVSTFYTIVIPMLNPIIYSLRNKDVKEAMRKLLKRKLVHE

SEQ ID NO: 2237 - protein, 321 aa, Mus musculus
  VARIANT (242)...(248): Any amino acid
MADRNLTVITEFILLGLTEDPVLNTVLSVLCLLIYVITVAGNLWIIVIILATDQLHSPKYFFLTHLAFLDFCYSSVFLPKMLINYLVGQNSISYHGCLLQYSFVNMFLTAECFLLAAMAYDRYLAICSPLYYRCLMTPTFCIYLVSASYLLGCANSLTHLRSLLNLTFCGPNVIDHYFCDIPLLFQLSCSDTHDSEVLFIVLSGATSITTFLIVISSYLGILITVLKIHSARGSYKAFIHLXXXXXXXCASHLTVVTLFYGTVNINYTWEPGSSFPQDTEKILSVFYTLLLPVLNLFIYSVRNKEAKEAMRRMIKRKIFAR

SEQ ID NO: 2238 - protein, 311 aa, Mus musculus
MDTWNYIKEFDFILMGLTDSKEIQLVLAIVFLMIYLVTVLGNTGMMLIICLDAHLHTPMHFFLTHLSFLDLIYSTVITPKTFENLFTSIKNNSFMGCITQLYYFVLFGGAQCFLLSSMAYDCYVAINPLYYLAVMSRRQWHAFLIGSYLMGAIDSSINMLCLNRMDFCVSHVINHFFCDTPTILALSYSDTYVIEIIIIIVFRSSLMVSLLTISVSYASILSTILKINSISGKQKAFSTCASHLLAVTISYSTAIFTYSKSKRLYSLGKDQVVSALYTIVIPMLNPLIYSLRNKEVENAVSRVIKKREDSR

SEQ ID NO: 2239 - protein, 292 aa, Mus musculus
  VARIANT (276)...(283)
MLRKNYTAVTEFVLLGLTDQAELQPVLFVVFLLIYLITVIGNVSMIFLIRSDSKLHTPMYFFLSHLSFVDLCYATNVTPQMLVNFLSKRKTISFIGCFIQFHFFIALVITDYYMLTVMAYDRYMAICKPLLYTSKMSRSVCLSLVAAPYIYGFANGLAQTILMLRLTFCGPNEINHFYCADPPLMVLACSDTYVKETAMFVVAGSNLTCSLTIILISYIFIFTAILRIRSAEGRRKAFSTCGSHLIAVTVFYGTLFCMYLRPPSEKSVEQGKIVAXXXXXXXXDLSNALVVS

SEQ ID NO: 2240 - protein, 247 aa, Mus musculus
MSLTNIEFILLGLTDRSEFQPLLFVLFLFIYLVTVLGNMCIMALIRLDSHLHKPIYFFLSNLAFVDLCYTSTATPQILTNVTISFIGCFQCYLLPTFYMLAPMAYDLYVAICNPLHYSLKMYRQDCICLAMCPYIYGFSDGLFQAILTLSIMSYKSSVINHFYCADPPLIKLSYSDIYIKEHAMLISAGFNLSNSLKIILVSYAFIMAAILRMKSAGGRHKSFSSCDSHMRAVTLFYGTLFCMYVRP

SEQ ID NO: 2241 - protein, 321 aa, Mus musculus
MAGSNATAVTEFILLGFVVQREVEIILFLIILVIYTLTLVGNVGMISLISMDSRLHTPMYFFLSNLAFVDLCYSSSVAPKFLETLLSNRRSISFYACATQLGFFLNFLISEMFLLAVMAYDRYVAICNPLLYMVVMSQKVCLRLVMGPYFYSFAVALLHTVVTFKLIYCGPNIINHFYCDDVPLMALACSDTSLKEILIFSFAGFNMISSLTTVLISYLYIVAAILRIQSTEGRYKAFSTCASHLTAVTIFYGTLIFMYLQPKSSHSLDTDKMASVFYTIVIPMLNPMIYSLRNQEVKSALRKALEKCYLLPLMHLKKGIS

SEQ ID NO: 2242 - protein, 171 aa, Mus musculus
YSFAVALLHTVVTFKLIYCGPNIINHFYCDDVPLMALACSDTSLKEILIFIFAGFNMISSLTTVLISYLYIVAAILRIQSTEGRCKAFSTCASHLTAVTIFYGTLIFMYLQPKSSHSLDTDKMASVFYTIVIPMLNPMIYSLRNQEVKSALRKALEKCYLLPLMHLKKGIS

SEQ ID NO: 2243 - protein, 183 aa, Mus musculus
FVVRSKMSRVVCIRLISVPYVYGFSVSLICTLWTYGLYFCGNIKINHFYCADPPLIKIACGGVHIKEHTMIVIAGINFTYSLSVVLISYVLIVVAVLRMHSADGRRKAFSTCGSHLTAVSMFYGTLIFMYLRRPTEESVEQGKMVAVFYTSVIPMLNPMIYSLRNKDVKEAVYKIVAKANLRK

SEQ ID NO: 2244 - protein, 154 aa, Mus musculus
CTLWTYGLYFCGNVKINHFYCADPPLIKIACGGVHIKEYTMIVIAGINFTYSLSVVLISYVLIVVAVLRMHSADGRRKAFSTCGSHLTAVSMFYGTLIFMYLRRPTEESVEQGKMVAVFYTSVIPMLNPMIYSLRNKDVKEAVCKIVAKANLRK

SEQ ID NO: 2245 - protein, 271 aa, Mus musculus
  VARIANT (92)...(156): Any amino acid
MPLTNSTKITEFILLGLTDRPELQPLLFVLFLFVYIVTVLGNMGMVALIRLDSRLHKPMYFFLSNLAFVDLCYTSTATPQMLTNFLSEKKTXXXXXXXXXXXXXXXXXXXXXXXXXXXXXXXHXXXXXXXXXXXXXXXXXXXXXXXXXXXXXXXXXSLTIILVSYAFIIAAILRIKSAEGRHKAFSTCGSHMMAVTLFYGTLFCMYVRPPTDKTVEESKIIAVFYTFVSPLLNPLIYSLRNKDVKQALKTILRQNVIRTALMRPPSNKLQQ

SEQ ID NO: 2246 - protein, 313 aa, Mus musculus
MERKNQTTVLEFLFLGLTDYLHQKVVLFIIFFLVYLVTLAGNVGMINLIWVDPRLHTPMYFFLSQLAFVDVCSSSCVAPKMLSDIFAEKKAISFMGCAAQMWFFGLFVTTDCFLLAAMAYDYTAVCKPLLYSVIMSKRVCVQFVIGPYLLAAINITTHTTLTFCLPFCGSNTINHFFCDVSPLLSLACADTWINKVVLFVLAGVIGVPSGLIIIVSYVCILVAILKIKTADGRQKAFSTCSSHLAAVSILYGTLFFIYVRPNASSSLDINKVISLFYTVVIPMLNPLIYSSRNKEVKDAVKRILRSNHFLTGA

SEQ ID NO: 2247 - protein, 294 aa, Mus musculus
  VARIANT (95)...(101): Any amino acid
MDEENITEVTEFILLGFTEDAVLQQVLFFIFLTIYIISLLGNITLISLICADSRLHTPMYFFIGNLSFLDLWYSSVYAPKILITCITEDKSISFXXXXXXXAYDRYVAISNPLLYFQAMSPRLRASLVAASYLGGFANSTIITSETFTLSFCRDNIIDDFFCDLPPLVKLACDVKESYQAVLYFILASNVITPTVLILASYLFIIVAILKIRSTQGRLKAFSTCGSHLTAVTLYYGSILFIYSRPSTSYALERDKVVSVFYTVVIPMLNPMIYSLRNKDVKDALRKMLDIVKLS

SEQ ID NO: 2248 - protein, 153 aa, Mus musculus
TANTFQLTFCGENIIDHFFCDAPPLVKMLCTDTRVYEKVLLGVVGFTMLSSILAILISYFNILLAILRICSASGRHNAFSTCASHLVSVMLFYGPFLFMYSRPSSTYSLEKDKVAALFYTVDNPLFNPLIYSLRNKDVKGAFRKASQTIQPHT

SEQ ID NO: 2249 - protein, 316 aa, Mus musculus
MKDKNETTVSESLFLSLTNRLYQKSILFILFLFVYLVTLGGGNLSMVTLIWVDPRLHTPMYFFLSHLSFVDMCSSSSIAPRMVYDIFTEEKIKHFFLGCTVQLWFAGLFVGTGCFLLANMAYEWYTAICKPLLYTLIVSKSVCTQFVIGPYLLAAINITTHETLTFCLPFCGPNTINHFFCDISPMLVLPCADSSINEIVIFVLDGTIGMLSDLIITVSYISILMAILKIQTTDERMKDFSSCSSHLAGVSIQYGTVFFIYVQPSTYTSLNTNKVISLFYTVMISMLNPLIYSLRNKEMKNALRRKVQRKHFSRDW

SEQ ID NO: 2250 - protein, 320 aa, Mus musculus
MYFLSIINIMKRGNVSESTEFHLMGLSDNQELQPVLFGVFLTIYLITLFGNLLIILATIFDSNLHTPMYFFISNLSFIDICFTTTTIPKMLVNIQAQVNSISYTGCLTQICFVLAFAGLENEILVMMAYDRFVAICHPLRYTVIMNPKLCGVMVLLSLLSILDALLHTLMALRLSFCTKLEIPHFFCELAHILKLACSNILINNILVYLVTSLFGILPLSGIIYSYTKIISSVLKIPSAAGKYKVFSTCVSHLVVVILFYGTGFGVYLSSAGTHSSRMSAIASVMYTVVTPTMNPFIYSLRNKDMVNAFKKLISRITTSL

SEQ ID NO: 2251 - protein, 312 aa, Mus musculus
MKRGNVSESTEFHLMGLSDNQELQPVLFGVFLSIYLITMFGNLLIILATVFDSNLHTPMYFFISNLSFIDICFTTTTIPKMLVNIQAQVNSISYTGCLTQICFVLAFAGLENGILVMMAYDRFVAICHPLRYTVIMNPKICGVMVLLSFLISILDALLHTLMALHLSFCTKVEIPHFFCELAHILKLACSNILINNILVYLVTSLLGVLPLSGIIYSYTRIISSVLKIPSAAGKYKVFSICASHLVVVILFYGTGFGVYLSSAGTHSSRKSAIASVMYTVVTPMMNPFIYSLRNKDMVSAFKKLISRITTSL

SEQ ID NO: 2252 - protein, 117 aa, Mus musculus
IEFYFVFSVLLLERCNSETKQLFLEFHLLGLTNDPELEPLIYGLFRLYLFTILGNIVILLAIFSDSHLHTPMYFFLSRLSINDVCLSISTIPKMLVNSQAQDNKISYIQCISQIYFV

SEQ ID NO: 2253 - protein, 178 aa, Mus musculus
VISFLVAARSKSGSACFKVHSLMVLQLSFGTNLEIHNFFCELAQVLNLACFDTFINNLLILVAVFIFMSGQVCGVIFSYTYILLSVLRMTSQTGKKKAFSTCTSHLSVIFLFYGSCLGVYFSSSVAEFTRHSAVASVMYTVDPQMLNPFIYSLRNRHEESLSEIHWLDILGSPLCSLI

SEQ ID NO: 2254 - protein, 308 aa, Mus musculus
MELCNVTSTLEFLLLGLSEDPELQPVLFALFLLIYLLTVLGNVLIILAISSDSHLHSPMYFFLYNLSLSDMGFSSTTIPKMLINTQTHNKSITYAACLTQVPFFFLFGCMDSLLLTVKACDWVAICYSLYYQIILNPCLCKCLVIVSFFISPMDSQVHFFMVSQLKFCTNLEIPHFFSDGTEILKLACTDITIINIAIFLVNIIAGFLPALGIFYSYYKIISSIVRVLSSLQKYKDFSTCGFHLSVVCLFYQTGIGVYLSTYISSSSKECVVALVIYTMVVPMMNPFIYILRNRDIKNNLQKIFTQIK

SEQ ID NO: 2255 - protein, 321 aa, Mus musculus
MESYNLTRTLEFLLLGLSEDPELQPVLFVLFLLIYLLTVLGNVLIILAISSDSRLHSPMYFFLFNLSLSDMGFSSTTMPKMLVNMQTHKKSITHSECLTQVSFFFLFGDMGGLLLTVMAYDRWVAICHPLHYQVILNPCLCRCLVIASFFISLVSSQIHCLMVSQLTFCTNMEIPHFFCDVTELLKLACSDTSINNIVRFLLSIILGFLPVSGIFYSYYKITSSIFKVPSLLGKYKAFSTCGSHLSVVCLFYGTGIGVYLSSTVSSSSRKSVVASVMYTMVVPMMNPFIYSLRNRDIKKALHKIVKQIMLTTLNDPLIYSF

SEQ ID NO: 2256 - protein, 195 aa, Mus musculus
MSYDRYVAICKPLHYTTIISNKICHQLIISSWLAGFLVIFPPLAMGLELDFCDSNIIDHFTCDSAPLLQISCTDTSTLELMSFILALITLMTTLMLIILSYICILRTILKFPSAKQREKAFSTCSSHMIVISISYGSCIFMYVKTSAKAGVALTKGVAMLNTSVAPMLNPFIYTLRNQQVKQAFKDLVRRKLASK

SEQ ID NO: 2257 - protein, 312 aa, Mus musculus
MKNHSVITEFVLLGISDDPEVQVVIFILLFIAYILSVTGNLTIIILTLLDSQLKTPMYFFLQNFSFLEIIFTSVSIPRFLESIITKVKTISYNNCLAQLYFFISMGVSEFFLLTAMSYDRYVAICKPLHYTLIMNQKVCTLLVLASWLAGFLTIFPPLMLVLKLDFCASNVIDHFSCDYFPILQLSCSDTRSLEMIGFYFAFITLLFTLALVILSYISIISTILRFPSASQRKKAFSTCSSHMIVISISYGSCIFMYVKPSANERASLTKGVAVLNTSIAPMLNPFIYSLRNEQVKQAFKDLINKVVLYRSK

SEQ ID NO: 2258 - protein, 314 aa, Mus musculus
MKNQSMELDFILLGLTDDPQLQIVVFLFLFLNYMMSLVGNLIIVLLTLLDPRLKTPMYFFLRNFSYLEIMFTTVCIPKFLTAIVTGDKTVSYNNCATQLFFYLLLGVTEFYLLAAMSYDRYVAICRPLHYPIIMNSKVCHQLVLSSWVTGFLIIFPPLAMGLKLDFCDSRIIDHFMCETSPILQISCTDTHFIEMMSFVLAVVTLVVTLVLVSLSYSFIIKTIMSFPSAQQRTKAFSTCTSHMIVVSITYGSCIFMYIKPSARERVSVSKGVALLYTSIAPLLNPFIYTLRNQQVKEVFWDILRKTLGFLKNKV

SEQ ID NO: 2259 - protein, 145 aa, Mus musculus
FCASNVIDHFLCDVSPLLQLSCSDTSLLEVMAFILALMTLIVTLIIVILSYAHIVKTIIKFPSAQQKKKAFSTCSSHMIVVSLTYGSCIFIYIKPSANERVTLSKGIAVLNTSVAPLLNPFIYTLRNKQVKQACGAILRKIFSAS

SEQ ID NO: 2260 - protein, 313 aa, Mus musculus
MSVANESISREFILLGFSDRPWLELPLFVVFLVSYILTIFGNMMIILVSRLDSKLHTPMYFFLTNLSLLDLCYTTSTVPQMLINICSTRKVISYGGCVAQLFIFLALGSTECFLLGVMSFDRFVAICRPLHYSVIMHQRRCLQLAAACWISGFSNSVLQSTWTLQMPLCGHKEVDHFFCEVPALLKLSCVDTTANEAELFFISVLFLLIPVTLILISYAFIVQAVLRIRSAEGRRKAFGTCGSHLIVVVLFYGTAIYMYLQPPSPTSKDRGKMVSLFYGIITPMLNPLIYTLRNKEVKGAFKRLVTRIILSRK

SEQ ID NO: 2261 - protein, 314 aa, Mus musculus
MNRANGSIFSGFILLGFSNRPQLETALFFAMLLIYFLSFLGNSTIILLSVIDPHLHTPMYFFLSNLSFMDLCLTTRTVPQTLFNFKGKDKTITYGGCVTQLFIALGLGGVECILLSVMAYDRYAAVCRPLHYMVIMHPQLCIKMVITAWLTGFGNSVVQTALTMSRPLCGRNQLDHFFCEVPVMLKLTCANSFINEAELFAVSVFFLVVPLSLILVSYGYITHAVLKIKSAQGRRKAFGTCGSHLLVVIIFFGTLISMYLQPPSSYSQDVNKSMALFYTLVTPLLNPLIYTLRNREVKSALRRIMGRRTDSTKS

SEQ ID NO: 2262 - protein, 231 aa, Mus musculus
MSNHTRVTHFILRGFSDVPQLRLVLIPFFLFFYTFGILGNFSIITAVTRDSRLHSPMYFFLKNLSFLDICYTSATIPKAVVISLTGSGVISYQECAAQLYIIFTFACTECFLLTAMAYDRCLAILRPLIYGTIMSQKYCSALVVTAWVGGAIYSAFHTFNTFSLPYCGPNVIDHFFCDMPPVMRLSCTDYHLTEEVGFAVSSCIVMSSFVLTVVSYIGIVATVLRIPSVEG

SEQ ID NO: 2263 - protein, 306 aa, Mus musculus
MESGNRSCGTDFTLVGLFQDGHMDTFLFTVISILFAVALIGNITLVILIRLDQRLHTPMYFLLSQLSIMDMMYISTTVPKMAANFLSDTKAISFLGCVIQTFVFLTLGGSEALLLGFMSYDRYIAICRPLHYPVFMSRKICCSMVAGAWSSSSITASVHTVYVFQLPFCGSRMVNHFFCEVPSLLPLVCEDTSQYEHTVLVSGLVILMLPFLAILASYARILVVVLQMGSGQGQSRAVSTCSSHLTVASLFYVTTLSTYTQPHTLHSPGRDKVVAVLYSIVTPVLNPFIYSLRNKEVMGALRRQMK

SEQ ID NO: 2264 - protein, 306 aa, Mus musculus
  VARIANT (132)...(270): Any amino acid
MDPSNYSTLHVFILLGFSDHPHLEMILSGVVTFFYIITLVGNTAIILASLLDPHLHTPMYFFLRNLSFLDLCFTTSIVPQMLVNLWGPEKTISSVGCIVQLYVYMWLGSIECLLLAVMSYDRFTAICKPLHXXXXXXXXXXXXXXXXXXXXXXXXXXXXXXXXXXXXXXXXXXXXXXXXXXXXXXXXXXXXXXXXXXXXXXXXXXXXXXXXXXXXXXXXXXXXXXXXXXXXXXXXXXXXXXXXXXXXXXXXXXXXXXXXXXXXXXFXXXXTPSLNPLIYTLRNRDMKDALKKLMRFYHRFAEVRRN

SEQ ID NO: 2265 - protein, 311 aa, Mus musculus
SIYENQSSTVTFILVGFSEYPDIQLPLFLLFLTIYTVTALGNLGMIAIIRLSPKLHTPMYFFLSHLSFVDFCYSTVVTPKLLENLIVEDRKISFTGCVMQFFFACIFVVTETFMLAVMAYDRFVAVCNPLLYTVAMSQKLCWSLVAGSYSWGIICSFVFIRFMLTLVFCGTKFINNFVCEHDAIVAVSCSDPYISQKVIFIFATFNELSSLMIILTSYVFIVITVMKMPTTGGRYKVFSTCASHLTTITIFHSIIICLYCVPTTKSSWLLVKVASVFYTVVIPMLNPLIYSLRNKDVKDAVKKLMCSSLSS

SEQ ID NO: 2266 - protein, 271 aa, Mus musculus
  VARIANT (87)...(92): Any amino acid
MECQRNISEFLLMGLSSKQNTEVFCFMFFLFCYFTILSWNLLILFSIRGSSLFNQPMYYFLSHLASMDICYTSCVTPKLIGGSACRXXXXXXPLHYMVIMSRNRCHVFIWASWVGGVAHSFPQVMMLVCLPFCGPNEIDHYFCDVFPLLKIACTDTYIIGVLMVANSGMVASVIFVLLFGSYVVILFTLRNYSAEGRRKALSTCGSHISVVILFFGSTIFAYLRPPTTFPEDKIFALFYTIIAPMFNPLIYTLRNKEMKTAIKKVWCQMSF

SEQ ID NO: 2267 - protein, 308 aa, Mus musculus
  VARIANT (58)...(138): Any amino acid
MECKRNVSEFLLMGLSSKQNTEVFCFIFFLFCYFTILSWNLLILFSIRCSSLFNQPMXXXXXXXXXXXXXXXXXXXXXXXXXXXXXXXXXXXXXXXXXXXXXXXXXXXXXXXXXXXXXXXXXXXXXXXXXXXXXXXXXFIWASWVGGVAHSFPQVMMLVCLPFCGPNEIDHYYCDVFPLLKVACTDTYIIGVLMVANSGMVAFVIFVLLFGSYVVILFTLRNYSAEGRRKALSTCGSHISVVILFFGPSIFVYLRPPTTFPEDKIFALFYTIIAPMFNPLIYTLRNTEMKSAIKKVWCQVTFLGEKHN

SEQ ID NO: 2268 - protein, 118 aa, Mus musculus
GIVVTANSGTIALGSFVILLISYTVILMSLRKQSSEGRRKALSTCGSHIAVVIIFFGPCTFMYMRPDTTFSEDKMVAIFYTIITPMLNPLIYTLRNAEVKNAMRKLWARKFSWETTGK

SEQ ID NO: 2269 - protein, 122 aa, Mus musculus
MHNNSMTEFILLGLTQDPEQQKAIFGVFLILYLMTLIGNFLIMVTIKMSQTLGSPMYVFLFYLSFADACFSTTTAPRLIVNALSQKKIISYNECMTQVFAAHFFGCMEIFVLILMAIDRYVA

SEQ ID NO: 2270 - protein, 309 aa, Mus musculus
MEPYNLTGTLEFILLGLSEDPELQLILFALFMLIYLLTVLGNVLIILAISCDSHLHSPMYFFFYNLSLSDMGFSSTTIPKMLINLHVHNRSITYAECLTRVYFFFLFGGMDSLLLAVMAYDRWVAICRPLHYQVILSPRLCRCLVIVSLSISLVSSQVHCLLVSQLTFCINVEIPHFFCDVPELVKLACSNTTINDIVMFLLSIIVGFLPASGIFYSYYKITSSIFRVPSLLAKYKAFSTCGSHLSVVCLFYGTGIGVYLSSTVSSSSRESMVASVMYTMVVPMMNPFIYSLRNRDIKKSLWKIVHQIT

SEQ ID NO: 2271 - protein, 515 aa, Mus musculus
  VARIANT (197)...(204): Any amino acid
MNDTFIVTMFAYFQVKTANFMEQENITATSIFILLGLSKETDIQPLVFGLFLFIYLVCITGNMLIILIITSDAHLQTPMYFFLSNLSFTDICFISTTVPKMLVNIQTQNKSITYEGCLAQMYFFMFFSGLDSLLLTVMAYDRFVAICHPLHYMIVMSPHLCVSLLLLSCLICLAYSLLQTLFFFSIFYVFNSFTFPXXXXXXXXAYKVCKSNGPLFPVMADAIFYICSSQELRGTGLIMLFHLGCRSLLLGYFLLLHWEPYDPSISLASTSVFAGPRHSLTRDSYICVLSIKSCCMQWCQRLDADYGVDPWLWQSLHGPSFHLSSKLRLCNSFHGCFVPKSKEGHSVHTSVFILLEFHVLQTLMFLRVSFCKKTEIPHYFCELAQILKLACSDTYANDILLYCVTGLLGIIPLSGILFSYSKIINSIVGISSARGKYKAFSTCGSHLSVVSLFYGTGLGVYLTSQMSYKSREGSIASVMYTVVTPMLNPFIYSLRNKDLNQALRRFFHSTGDRFR

SEQ ID NO: 2272 - protein, 109 aa, Mus musculus
MEPYNLTGTLEFILLGLSEDPELQLILFALFLLIYLLTMLGNVLIILAISCDSHLHSPMYFFLYNLSLSDMGFSSTTIPKMLINLHAHKRSTTYAECLTQVSFFILFGC

SEQ ID NO: 2273 - protein, 310 aa, Mus musculus
VSSTNQYSVSEFILLELSRQPQQQQLLFLFFLIMYLATVLGNLLIILAISTDSRLHTPMYFFLSNLSFVDVCFSSTIVPKVLAIHILRNQAILYSGCLTQLYFLCVFADVDNFLLAVMAYDRFVAICHPLHYTTKMTHQLCALLVVGSGVVANLNCLLHTLLMALSFCENYIIPHFFCDATPLLKIFCSDPHLNDLMIHTEGTMIIVTPFVCILISYIHITYAILRVSSHRGGWKAFSTCGSHLAVVCFFYGTIITEYFNPSSSHSARRDMTAAMMYTVVTPMLNPFIYSLGSRVMKRGFKKSAYHEIYI

SEQ ID NO: 2274 - protein, 309 aa, Mus musculus
MAPVNQSVVTMFILQRFVDDPRVQDVLFCLFFALFVAAIAGNGLIIATIHSSPNLHTPMYFFLVNLALMDVICTVTVLPKVLQSLVAENSISYGGCLTQMFVFSWVLGSELLLFSAMAYDRYLAICRPLHYGTLMSGRVCVALATFVWFTGAFNSLVLTCLMLPLSFCGPNLITHFFCEIPSVLILSCSPTFINDIMTVIADMFLTGLNFLLTMTSYGFIISSILRIRSAEGKKRAFSTCSAHLVVVTLYYSTVLYTYVRPALGTAGFLDKLIAVLYTTVTPSLNPLIYTLRNKEFKTSFKKLISLLRT

SEQ ID NO: 2275 - protein, 188 aa, Mus musculus
PFRYPVIMSPGLAAFLAGGSWLSGFTISLGKVFFISRLGYCGPNVMNHFFCDVSPLLNLACSDMSVAELVDFLLALLILLGPLLLTVFSYTAILSTVLRMPSAGGRQKAFSTCASHLAVVVIFYSASLFIYARPRALYSFDYNKLVSVVYTVLTPLINPIIYCLRNQEVKQALHKVQQRAAQVLGASS

SEQ ID NO: 2276 - protein, 313 aa, Mus musculus
MAFQADGNHTTVTEFLLLGLTDDPVLRVILFTIILCIYLVTVSGNLSTILLIRVSSQLHHPMYFFLSHLASVDIGISSSVTPNMLVNFLVERNTISYLGWGIQLSFGDIFGSVECFLLATMAYDRFMAICNPLLYSTKMSTQVCVQLVVGSYIGGLLNASFAMVSFFSFLFCGSNRVEHFFCDFVPLAELSCSDISISVVLVSFSAGSVTMLTVFIIVISYSYILITILKMRSTEGRQKAFSTTSHLTAVTLFYGTITFIYVMPKSSFSTNQNKVVSVFYMVVIPMLNPLIYSLRNNEIKDALRRHLGKKTLS

SEQ ID NO: 2277 - protein, 307 aa, Mus musculus
LAFLEDGNHTIVTEFTLLDLTEDLVLRVILFSIILCIYLVSVSGNLSTILLITRLYHTMYFFLSHLASVDMGLSSSVTPNMFVNFLTERHTISYFGCGIQLSSAAFFGAVEFFLLAVMTYDCLIAINPLLYSTKLSTQVCILVVGSYVGGFLNASFVTHFFLSFLFYGPNRVNHFFCDFHPMMELSCSDVSVSGIVISFTAGLISMTTLIVIVISYFYSLITILKMQSTEGHQKTFSTCAAHLTAVILSYGTATFFYVMPKSTYSEDQNKVVSFYTVAIPVWNPLIYSPWNTETKNALKQFYRKTLL

SEQ ID NO: 2278 - protein, 311 aa, Mus musculus
MVNQSSPVVFFLLGFFEHPQLEKVLFVVVLCSYLLTLLGNTLILLLSTLDPRLHTPMYFFLSNLSFLDLCFTTTCVPQMLFNLWGPEKTISFLGCFVLFIFMSLGTTECILLTVMAFDRYVAVCQPLHYATVINPRLCQQLAGIAWAIGLVQSIVQTPPTLKLPFCSHRQIDNFVCEVPSLIQLSCGDITYNEIQMAVASIFIVVVPLSLILVSYGAIARAVLKISSAKGRRKAFGTCSSHLIVVTLFYSSVIAVYLQPKNPYARERGKFFGLFYAVGTPTLNPLVYTLRNKEVKRAFWKLLRKDEDSEES

SEQ ID NO: 2279 - protein, 274 aa, Mus musculus
GTHFILLLSTLDPRLHSPMYFFLSNLSFLDLCFTTTCVPQMLFNLWGPTKTISFLGCSVQLFIFMLLGTTECILLTVMAFDRYVAVCQPLHYATIIHPRLCRQLAGVAWAIGLIQSIVQIPPTLTLPFCSHRQIDDFLCEVPSLIRLSCGDTTFNEIQLSVAGVIFLLVPLSLIIVSYGVIARAVLKTNSSKGRRKAFGTCSSHLIVVTLFYSSVIAVYLQPKNPYAQERSKFFGLFYAVGTPTLNPLVYTLRNKEVKRAFWRLLGKDAASGGN

SEQ ID NO: 2280 - protein, 260 aa, Mus musculus
TIWILPFRPLSFFLFYLVFQDKSGCRKAVEKETHKVAKSLATLAGCLLQFLTFTSLDADEYFLLTLMAHDHCLAIFYSLYPRLMRPQWCLGLVIIVWLSGFMEAGLVVALTAQLRFCGPNLIDHFYCDFSPLMILACSDTVAQMTTFVLFVVFLPVLSGLILMSYAQFVVIVLRIPSGARRTKAFFTCSSHLAMMFTFYGSLMVWYTAPSAVLSLQLLSKVIALLYTVFAPIFNSVIYTLRNLDMQKALRRLLYCKSTEM

SEQ ID NO: 2281 - protein, 251 aa, Mus musculus
DTPLHPPPSFFLSYLVLQGWKAEYRKAVEKGTHKVAKSLVTLPGCLLQFFTFSSLYIDEYFLLALMAYDHCLAICYSLYPRLMRPQWCLGLVLTVWVSGFMEDGLVVALTAQLRFCGPNLIDHFYCDFSPLMACFDTVAQMTTFVLSVIFLTVPFGLVLISYAQIVVTVLRILSGARRTKAFFICPSHLAVVSTLYGTLMGLYTVPFVVHSQLLTKVIALLYTVFTPVFNPVIYTLKNQEVQQALRRLLYC

SEQ ID NO: 2282 - protein, 301 aa, Mus musculus
IIGFPMQGGQPNYIYIHKQQKWTQQIVYIYVCVCVCVCVCVCVAYVHTYTYKYICVYKWLSSKSSRDLEGGWKMSVEKRTQSRQKSGYTGQLLPPVLHPWLCRKYFLLIVMVYDHYLTICHHLYPFLMGPLWGLGFGLTTSFVVDELIVALMAQLRFCVPKQIDHFYYDFSPLVVLAYTDTGLVQVTTFVLFVVFLTVPFGLVLISCAQIAVTVLRVPSRTRRNKAFSTCSSHLDEVSTFYGSLMVWYTEPSAVHSQILSKVIALLYTVVTTIFDPGIYTLRNQEVQQSLRRHLYCKPTEM

SEQ ID NO: 2283 - protein, 293 aa, Mus musculus
  VARIANT (68)...(111): Any amino acid
MEDMAAGNHCTVTEFFLAGLSEKSELQLPLFLLFTGIYLITMAGNLGMITLIGLSSHLHTPMYYFLSXXXXXXXXXXXXFXXXXXXXXXXXXXXXXXXXXXXXXXXXXXXXLLYNVTMSYQIYSSLISGVYIFAVICSSFNTGFMLRTQFCNLDVINHYFCDLLPLLNLASSNTYINEILILFFATLNSFVPVLTIITSYIFIIVTILSIHSREGKFKAFSTCSTHISAVAIFYGSGAFTYLQPSSLNSMGQAKVSSVFYTTVVPMLNPLIYSLRNKDVSIALKKILERKKFM

SEQ ID NO: 2284 - protein, 178 aa, Mus musculus
MEDMTAGNHCTVTVFFLAGLSEQSELQLPLFLFFTGIYLITVSGNLGMIILIGLSSNLHTPMYYFLSSLSFIDFGQSTVVTPKMLVSFLTEKNFITYPGCMTQLYFVIIFGTAESYTLAAMAYDHYVAICNTLVYNIAMSSQIYCSLISGVYIFAVFCASVNMGFMFRIQFCKSDVIN

SEQ ID NO: 2285 - protein, 178 aa, Mus musculus
SYQVCLLMVAVVYGIGLISATAHTVFLLRLFFCKADKINHYFCDLFPLLELSCSSTFINEILALSFSAFNIIVPAMTIIGSYIFIIISILHIKSSGGRVKAFRTCSSHILAVAIFFGSTTFMYLQPSSVSSMDQGKVSSVFYTIVVPMLNPMIYSLRNKDVKVALKKLLQKMFPQNKE

SEQ ID NO: 2286 - protein, 183 aa, Mus musculus
VCLLLMSVCWILGSLDGFMLTPITMTFPFCGSREIHHFFCEVPAVTKLSCSDTWLYETLMYVCCVLMLLIPVTVISGSYTSILLTVLRMNSAEGRKKALATCSSHMTVVTLFYGAAVYTYIFPASLHTPEKDMVVSVFYTILTPLLNPLIYSFRNKNVTEAMKKLLGVKPFFQESLKEVIYKE

SEQ ID NO: 2287 - protein, 306 aa, Mus musculus
METGNRSCGTDFSLVGLFQYGHMDTFLFTVISILFAVALIGNITLVLLIRLDQRLHTPMYFLLSQLSIIDMMYISTTVPKMAANFLSDTKAISFLGCAVQAFVFLTLGGSEALLLGFMSYDRYIAICQPLHYPVLMSRKICCSMVAGAWSSSSINAFIHTVYVFQLPFCGSRMVNHFFCEVPSLLPLVCEDTSQYEYTVLVSGLVILLLPFLAILASYARVLVVVLQMGSGKGQSRAVSTCSSHLTVASLFYVTGLSTYTQPHSLHSPGRDKVVAVLYSIVTPVLNPFIYSLRNKEVMGALRRQMG

SEQ ID NO: 2288 - protein, 259 aa, Mus musculus
  VARIANT (71)...(83): Any amino acid
MDLTTWMNNYTGQSDFTLVGLFSQSKHPALLAVVIFVVFLMALSGNALLILLILSDTHLHTPMYFLSASCXXXXXXXXXXXXXVCLLLMSVCWVLGSLWDGFMLTPVTMTFPICGSREIHHFFCEVPAVTKLSCSDTWLYETLMYVCCVLMLLIPVTVISGSYTSILLTVLRMNSAEGRKKALATCSSHMTVVTLFYGAAVYTYMLPASLHTPEKDMVVSVFYTILTPLLNPLIYSLRNKNVTEAMKKLLGENPSFQKQ

SEQ ID NO: 2289 - protein, 307 aa, Mus musculus
WDLSSPILLGLFPELCHLGILVISILLIYLIAFTGNAILVLLIWADSHLRTPMYILLSQLSSLLLDLALISATAPKMVINFFSRKKSISKVACGTQIFCFFALGGRECLLLTLMAYNHYVAVCHPLRYSIIMNNRVCLWMALMSWGGGALNSLINTFYIMHFPFCGSREIHHFFCELSTVLRLSCEETSLYEMVVSVNCIVFVLLLLGLITSSYLLIFLDVLRINSPEGRRKALATFSSHLAVVSLYYGPAYIYMTPTTFHTPEQNEILAMINTIFTPMLNPLIYSLRNKEVHAALRKVMSQRFILK

SEQ ID NO: 2290 - protein, 119 aa, Mus musculus
MSNYTTQSDLTLAGLFSRSKHPVLLAVVIFVVFLMALSGNALLILLILSDTHLHTPMYFFISQLSLMDMRYISVTVPKMLMDQVLGSHKISPAACGMQMFLYLTLAGSEFFPLAAMSYE

SEQ ID NO: 2291 - protein, 277 aa, Mus musculus
YLVTVFGNLSTILLIGVSSKLHHPMYFFLSHLASVDMGLSSSVTPNMLVNFLTEKNTISYLGCGIQLSSAAFFGAVEFFLLAAMAYDRLVAICNPLLYSTKMSTQVCIQLVVGTYVGGFLNASFVTHFFFSFLFCGPNRVNHFFCDLSPMMELSCSDVSISEIVISFSAGSFTMTTLFVIVISYFYIVITILKMHSTEGRQKAFSTCMSHLTAVTLYYGTTIFIYVMPKSIYSRDQNKVVSLFYVVVIPVLNPLIYSLRNNEIKDALKRQFYRKTLL

SEQ ID NO: 2292 - protein, 208 aa, Mus musculus
MISYGFPGQWNHTAVTEFILLGLTDDPVLRVILFSIILCIYLVTVSGNLSTFLLIRVSSQLHHPMYFFLSHLASVDMGLSSSVTPNMLVNFLTERHSISYLGCGIQLSSAAFFGAVEFFLLAVMAYDRFIAICNPLLYSTKLSTQVCIQLVVGSYVGGFLNASFVTHFFFSFFFCGPNRVNYFFCDFPPMMELSCSDVSVSGIVISFT

SEQ ID NO: 2293 - protein, 177 aa, Mus musculus
MAFIYNGSQTTVTEFILLGLTDDPVLKVILFSIILCIYLVTVFGNLSTILLIGVSSKLHHPMYFFLSHLASVDMGLSSSVTPNMLVNFLTEKNTISYLGCGIQLSSAAFFGAVEFFLLAAMAYDRLVAICNPLLYSTKMSTQVCIQLVVGTYVGGFLNASFVTHFFFLSFCGPNRVN

SEQ ID NO: 2294 - protein, 189 aa, Mus musculus
MAHNNESTVSEFVLLGLSKSWGLQLVLFTIFFVIYVTSVLGNIMIIVIIFSDSHLNSPMYFLLSNLSFIDICQSNFATPKMLVDFFVEYKTISFEGCMAQIFLLHSFVGSEMMLLVAMGYDRFVAICKPLHYNLIMNRRVCIIFVSISWAVGILHSVSHLAFTVNLPFCGPNEVDSFFCDLPLVIKLAC

SEQ ID NO: 2295 - protein, 149 aa, Mus musculus
ALTVNLPFCGHNIINNIFCDLPLVIKLACIETYTLELFVIADSGLLSFISFFLLLVSYTVILLIIKHKSPGSLSKALSTLSAHIIVVTLFFGPCIFIYAWPFGSFASNTTLAVFYTVITPLLNPIIYTLRNQEMKKAMRKLWIQQVSCT

SEQ ID NO: 2296 - protein, 290 aa, Mus musculus
  VARIANT (86)...(91): Any amino acid
MAVTNESHPKEFILLGFANHPWLELPLFVTLLITYPMALMGNIAIILVSTLDPRLYSPMYFFLKNLSFLDMCYTTSIVPQMLFNLXXXXXXLLAIMSFDRYVAICKPLHYTLIMNQRVCILSVSIMWLTGVIFGFSEATLTLQLPLCGTNKLDHLLCEIPVLIKTACGEKEFNELALSVVCIFILIVPLCLILASYVNIGCAVLRIKSSEGRRKAFGTCSSHLIVVSLFYGPGISMYLQPSSSITRDQPKFMALFYAVITPTLNPFIYTLRNKDVKGAFKKLLRSIFSSK

SEQ ID NO: 2297 - protein, 320 aa, Mus musculus
  VARIANT (197)...(270): Any amino acid
MEVNRSQVTDFVLKGITDHTELQVPLFLLFFFIYVTTMVGNLGLIFLIWKDPHLHTPMYYFLGSLAFADACTSSSVTPRMLVNILDNGKMISLSECMAQYYVFGSSATTECFLLVAMAYDRYVAICNPLLYLVVMSNRVCTCLISGSYIIGFLHPLIHVGLLFRLTFCKSNIIDHFYCEILPLYTISCTDPSINAFXXXXXXXXXXXXXXXXXXXXXXXXXXXXXXXXXXXXXXXXXXXXXXXXXXXXXXXXXXFXXXXXXXXXXXXXXXMYVSPGSGPSKYKNKMYSLFYTIVIPLLNPFIYSLRNKEVLGALRKIIKS

SEQ ID NO: 2298 - protein, 306 aa, Mus musculus
MTVENQTVVAVFVLTGLTERPELQVPLFLVFFTIYLITMVGNLGLIALIWKDPHLHTPMYLFLGSLAFADACASSSVTPKMLVNFLSKDHRTFLVECFTQFYFFGSSATTECFLLSVMAYDRYVAICNPLLYPVMMSNSLCMKFIHVSYIVGFLHSAIHVGLLVRLNFCKSNIIHYFYCEILQLFKISCTDPTMNVLLVLIFSALIQGLTFMTIIVSYFSVLLAILKTKSERGRRKAFSTCSAHLLSVSLFYGTLFLMYVRPGSGSGEDKDRMYSLFYTIIIPFLNPFIYSLRNKEVTAALRRKMK

SEQ ID NO: 2299 - protein, 236 aa, Mus musculus
SSTVTPKMLQDIFSKSKLISFSECMIQFFSFVVSTTTECFLLAAMAYDRYVAICKPLLYPVIMTNRLCVRLLTLSFLGGFIHALIHEGFLFRLIFCRSHIINHFYCDVMPLLKISCNDPSINYLMLFIFSGSIQVFTITTILVSYTLVLFSILKKKSLKSIKKAFSTCGAHLLSVSLYYGPLLFMYVRPASPQVNDEDMMDSVFYTIIIPVLNPIIYSLRNEQVKKSLAKCLRRNS

SEQ ID NO: 2300 - protein, 306 aa, Mus musculus
EIKNSTVLTEFVLTGLTGSPELQVPLFLFFLVIYLITIVGNLGLIALIWNDPHLYIPMYFFLGHLAFVDACLSSTVAPKMLLDFLQMNKMISYSECMTQFFIFAICVTTECFLLSALAYDRYVAICKPLLYPMIMTNRLCICLLVLSFVGGHSSIHEGFLLLLTFCNSNIVHQFFCDTVPLLKISCTDTTLNFQLLFVFAGIIQVLTVLIVFVSYTLVLFMILQRKSVQGMKKAFSTCGAHLLSVSLYYGPLLIMYVFPVSQEADGQDIIDSLFYTIIIPVLNPIIYSLRNKQVIDSLKKVLKKKV

SEQ ID NO: 2301 - protein, 161 aa, Mus musculus
FLGGFIHALIHESFLFRLIFCSSHIIHHFYCDVIPLLKISCNDPSINYLMLFIFSGSIQVFTITTILVSYTLVLFSILKKKSLKSIKKAFSTCGAHLLSVSLYYGPLLFMYVRPASPQVNDEDMMDSVFYTIIIPVLNPIIYSLRNKQVKKSLAKFLRRNT

SEQ ID NO: 2302 - protein, 141 aa, Mus musculus
FCRSHVIKHFFCDVPPLYRLSCVDPYINELMILIVAGSVQTFSIIIVLISYFCILYTIFTMKSREGRSKALSTCASHFLSVSIFYGSLLYTYIRPSSIKGGDEAIPVAIFYTLVIPLLNPFIYSLRNKEVINVIKKTINKG

SEQ ID NO: 2303 - protein, 133 aa, Mus musculus
FYCDVMPLLSISCNDPSINYLMLFIFSGSIQVFTITTILVSYTLVLFSILKQKSLKSIKKAFSTCGAHLLSVSLYYGPLLFMYVRPASPQVNDEDMMDSVFYTIIIPVLNPIIYSLRNKQVKKSLAKFLRRNT

SEQ ID NO: 2304 - protein, 307 aa, Mus musculus
MENDSFVSEFILMGLTDHPELQLSLFVLFLMNYTAIVMGNLSLMILIFLNSNLHTPMYFFIFNLSFIDFCYSFVFTPKMLMSFFLEKNTIYFRGCMTQLFFFCFFVNSESYVLTAMAYDCYVAICKPLLYKTIMVPRICCLLMFVYLIGFTSAMILTGLMFRLNFCNNHIINHYMCDIFPVIQISCSDTYLNELVSTAVVGTGIILCSLLILMSYALILFNILNMSSGKGWSKAMGTCGSHIITVSLFYGSGLLAYVKPSSAETVGQGKFFSLFYTFLVPVLNPFIYSPQNKDVKVAVKKTLKRISN

SEQ ID NO: 2305 - protein, 312 aa, Mus musculus
MVLDNGSYMTEFILLVLNDPDLQLPLFLLFLLIYTTTTLGNLALITLIALNSLLHSPTYCSPLNLSLIDLCYSSVITPKMLMNFLVRKNIISYMECLPSSLLFVFCFSAICECCVLISMAYDNYMAVCNPVLYNITISPKVCSYLMLGSHIMRFSGAMIHTGSILRLPFCDRSIIKHYFCELFPLLQLSCTSIYANEIEILIIDSKDIIVSSVIIFTSYGFILSNILQMRSTAGMSKAFSTCISHILTFSLFFGSCALMYLHPSSPGSMDQGKVSSVFYIIVVPMMNPLIFSFRNKDIKIALRKVLSKKRFL

SEQ ID NO: 2306 - protein, 311 aa, Mus musculus
MASGNDSTTVKEFILLGLTQQPELQLPFFFLFLGIYVVSIVGNLGLIVLIVLNPHLHTPMYYFLFNLSFIDFCYSSVITPKMLVGFVKQNIISHAECMTQLFFFAFFVIDECCILTAMSYDRYVAICKPLLYKVTMSYQVCFMMTVSVYMMGFVGAIAHTICMLRLTFCDGNIINHYMCDIPPLLKLSCTNTSVNELVVFIVVGVNVIGPTLIIFTSYTLIIFNISHIRSTEGRSKAISTCSSHIIAVSIFFGASAFMYLKPSPVGSVGEDKVSTVFYTIVGPMLNPFIYSLRNKDVHIALHKTLKKSMLI

SEQ ID NO: 2307 - protein, 235 aa, Mus musculus
MDSFNATLEERFFLVGFLDWPQLELILFVFISIFYSLTIFGNTAIIALSQMDLRLHTPMYYFLSHLSFLDLCYTTSTVPQLLINLHGLDRTISYGGCVAQLFISLALGSTECVLLVVMAFDRYAAVCRPLHYMTIMHPLLCQALALASWVGGFLNSLIQTGLMMAMPLCGHRLNHFFCEMPVFLKLACQDTGGTEAKMFVARAIILVFPATLILGSYGHIAKAVLKVKSTAGRRK

SEQ ID NO: 2308 - protein, 311 aa, Mus musculus
MQNQSIVTEFILLGLSQNPKVEKILSVLFFLVYLATIGGNIIIVVTIVFSPALSGSPMYFFLSFLSFLDACVSSVITPKMIVDFFYERKTISFECCMIQLFAVHFFTGVEVIVLSAMAYDRYVAICKPLHYSSIMTQRLCGILVGIAWAGGFLHSIIQIIFTLQLPFCGPNVIDHFVCDLFPLLKLACTNTHIFVILVFANSGSICIIIFSILLVSYGVILFSLRNHSSEGRRKALSTCGSHITGVLLFFVPCILIYARNNSEFSFEKNVFIFDDVLTPMLNPLAYTFRNKEMKNAIKKMWRRLFNISDKH

SEQ ID NO: 2309 - protein, 264 aa, Mus musculus
MNSIYFNILLEIMQNQSFVTEFIFLGLSQNPKVQKIVFIVFLFVYIATVGGNMIIVVTIVCSPALIDCPMYFFLAFLSLLDACFSSVITPKMVVDSLYEKKTISFEGCMMQLFAEHFLAAVEVIVLTAMAYDRYVAICKPLHYSSIMNWRLCGTLMGIAWTGGFLHSIIQIIFTLQLPFCGPNVIDHFMCDLFPLLELACTDTHIFGLLVVANSGSICIIIFSILLVSYGVILFSLKDHSSEGRWKALSTCGSHIAVVVLFFVP

SEQ ID NO: 2310 - protein, 344 aa, Mus musculus
  VARIANT (124)...(301): Any amino acid
MWIHLEFMENHKNVTEFIFMGLWENRQIELLFFLLFLLCYLAVLMGNSVILLTITCSHLIEQPMYYFLCHLSLMDLCYTSTVIPRLIRDLAATRKNISYNECMTQLFTAHLLAGVEIFILVSRXXXXXXXXXXXXXXXXXXXXXXXXXXXXXXXXXXXXXXXXXXXXXXXXXXXXXXXXXXXXXXXXXXXXXXXXXXXXXXXXXXXXXXXXXXXXXXXXXXXXXXXXXXXXXXXXXXXXXXXXXXXXXXXXXXXXFXXXXXXXXXXXXXXXXXXXXXXXXXXXXXXXXXXXXXXXXXXXXXFYTVIAPMLNPLIYTLRNSEMKSAMHKVWSRLSLRVEVSERIL

SEQ ID NO: 2311 - protein, 157 aa, Mus musculus
SIIQIIFTLQLPFCGPNVIDHFMCDLFPLLELACTNTYVYGLLVFANSGSICIIIFSMLLISYGVILFSLRSHSSEGRWKALSTCGSHIAVVVSFFVPCIFIYARSTSASSFEKKVAVFDGIMTPLLNPLIYTFRNKEMKNAIRKMWNRFRMVSDKF

SEQ ID NO: 2312 - protein, 310 aa, Mus musculus
  VARIANT (153)...(226): Any amino acid
MGQSNNVTEFVLLGFTQDPAGQKALFVMFSLMYIATMVGNLLIVGTVIASPSLGSPMYFFLASLSLMDAVYSTAISPKLIVDLLREKKTISFRACISQLFIEHLFGGVDIVILVAMAYDRYVAICKPLHYLIIMNRRVCILLLVMAWAGGFAXXXXXXXXXXXXPXXXXXXXXXXXXXXXXXXXXXXXXXXXXXXXXXXXXXXXXXXXXXXXXXXXXXXXXXXXXXLSTCGSHITVVFLFFVPCIFMYVRPVSSFPIDKSITVIYTIVTPMLNPLIYTLRNSEMKISMEKLLQKTLSPCRIRLSSCCLCY

SEQ ID NO: 2313 - protein, 120 aa, Mus musculus
MGQSNNVTEFVLLGFTQDPAGQKALSVMFSLIYIVTMVGNLLIVGTVIASPSLGSPMYFFLASLSLMDAIYSTAITPKLIVDLLCEKKTISFRACISQLFIDHLFGGVDIVILLAMALDR

SEQ ID NO: 2314 - protein, 312 aa, Mus musculus
MERVNQSVVSEFVFLGLTNSWSIQLFLFVFSSTFYVASMMGNSLIVFTVASDPHLHSPMYFLLANLSFIDLGVSSVTSPKMIYDLFRKHKVISFTGCVTQIFFIHVIGGVEMVLLIAMAFDRYVAICKPLHYLTIMSPRMCILFSVTAWVVGLMHSLIQLAFVVNLPFCGPNVLDSFYCDLPRFIKLACINTYQLELMVTANSGFISVGSFFILIISYIVIIITVQKHSSSGSSKALSTLSAHISVVFLFFGPLIFFYTWPSPSTHLDKFLAIFDAVITPFLNPIIYTFRNQEMKVAMKRVCRQLVSYRKAS

SEQ ID NO: 2315 - protein, 320 aa, Mus musculus
MDGGNHSMVSEFLLLGLTNSWRIQILLFLFFTVFYVASMLGNLLIVLTIISDHHLHSPMYFLLANLSFIDTGVSSIATPKMIYDLFRKHKVISLNGCITQMFFIHTVGGTEMVLLIVMAYDRYIAICKPLHYLTIMSLRMCIVLLALAWIIGLIHSVAQLAFVVNLPFCGANKMDSFYCDFPRFIKLACTDTYRLEFLVAANSGFISMATFFILIVSYIFILVTVRKHSSGASSKALSTLSAHITVVVFFFGPCIIVYVWPFPTLPIDKFLAIFDVIITPFMNPLIYTLRNNEMKVAMRRLFIRALHFKNFFISSLRDLS

SEQ ID NO: 2316 - protein, 294 aa, Mus musculus
  VARIANT (59)...(107): Any amino acid
MDGENHTVVSEFVFLGLTHSWEIQLLLLVLSSVLYILSMAGNILIVFSVTIDPHLHSPXXXXXXXXXXXXXXXXXXXXXXXXXXXXXXXXXXXXXXXXXXXXXXXXXICKPLHYLTIMSPRVCVLFLGAAWGLGISHSLFQLAFLIDLPFCGPNVLDSFYCDLPRLLRLACKDTYKLQFMVTINSGFICVGSFLLLLISYIFILFSVWKHSSGGSSKALSTLSAHITVVFLFFGPTLFIYTWPHPNSQIDKFLALFDAVLTPFLNPVIYTFRNKEMKVAIKRVLKVLLTFRNIS

SEQ ID NO: 2317 - protein, 323 aa, Mus musculus
MAEETRNRTWVREFVLEGFPVAEHLRILFFLMHLLAYLASIMGNTLIISITCVDHRLQTPMYFFLSTYSFVECCFITTVIPQLLAIFLSGRQTISFVACFTQALVVFVLGATVFFLLAVLSLDRYLAICKPLHYPTIMSPRMCFLLVTVCLVLGFLFMAGPVVMLSQSSYCGPNVIPHFFCDFGPLANLSCSDTMSVEMLFFNLALIVLFGSLLVAIFAYSNIVVTIVGLPSAREKQRAFSTCSSHLIVLSLMYGSCVFIYMKPKQTSRLDTNREAALVNMVVTPLLNPVIYTLRNKQVHQALRDALSRVQLPRYHRSSAPSL

SEQ ID NO: 2318 - protein, 327 aa, Mus musculus
MERLTAEETRNGTWVQEFVLEGFPVAEHLRILFFLMHLLAYLASLMGNTLIISITCLDHRLQTPMYFFLSTFSFVECCFITTVIPQLLAIFLSGRQTISFVACFTQAFFFLFLGATVFYLLAVLSLDRYLAICKPLHYPTIMSPRMCFLLVTVCLALGFLFMAGPVVMLSQSSYCGPNVIPHFFCDFGPLANLSCLDTRSVEMLFFNLALIVLFGSLLVAIFAYSNIVVTIVGLPSAREQQRAFSTCSSHLIVLSLMYGSCVFIYMKPKQTSRLDTNREAALVNTVVTPLLNPVIYTLRNKQVHQALRDALSRVKLPRFQRSNAPSL

SEQ ID NO: 2319 - protein, 69 aa, Mus musculus
SHLAVVCLFYGTIISLNFNSSSSHSTGRDMAAAMMYTVVTPMLNPFIYTLRKRDMKRGLSKVLTMNIHL

SEQ ID NO: 2320 - protein, 310 aa, Mus musculus
MGKENQTWVSEFLLLGLSSDWWTQVSLFVLFLAMYLLTVLGNLLIILLITLDSKLHTPMYFFLSILSFVDICYTNSTVPQMLVHFLSARKSIPFHSCVMQLYISLAMGSTEFFLLGAMAYDRYVAVCYPLHYMVIMHGGLCLGLASACLTAGLTNSLMQTLMIFHLPFCRKVINHFACEMLAVLRLSCVDISLNKVMVAISGFLVIMLPCILVLFSYAHIVAAILRIRSSQGRKAFGTCASHLTVVSMCFGTAIFTYMRPVGRSSAGQEKMVALFYAVVTPMLNPLIYSLRNNDVIGALKRTLEKLKEKK

SEQ ID NO: 2321 - protein, 288 aa, Mus musculus
  VARIANT (117)...(124): Any amino acid
  VARIANT (126)...(134): Any amino acid
MRENMTWVSEFILMGLTSDKNIQAGLFVLFGVTYLLTLLGNGLIVLLIALDPRLHLPMYFFLCHLSVVDICYTSSGVPQMLAHFLMEKKTISFALCGTQLFFALTLGGTEFLLLAAXXXXXXXXFXXXXXXXXXTAVTMCLPTCGHNVLNHVACETLTLVRLACVDITLNQVVILASSVVVLMIPCSLVSLSYAHIVAAIMKIHSTQGRRKAFETCASHLTVVSMSYGMALFTYLQPASTASAEQDKVVVIFYALVTPMMNPLIYSLRNKDVKAAFRRVLMKNIESKN

SEQ ID NO: 2322 - protein, 297 aa, Mus musculus
  VARIANT (105)...(111): Any amino acid
MGKDNQTWIHEFILLGLSSDWNTEVSLFVLFLLMYLVTVLGNFLIIVLIRLDSRLHTPMYFFLTNLSLVDVSYATSIVPQLLAHFLATHKTIPFLSCAAQLFFSXXXXXXXYSAIMHTGLCSRMAIVSWVGGSINSVMQTAITFQLPMCTNVYIDHISCELLAVVRLACVDTSANEVAIMVSSIILLMTPFCLVLLSYIQIISTILKIQSKEGRKKAFHTCASHLTVVALCYGMAIFTYIQPHSSPSVLQEKLISLFYAILTPMLNPMIYSLRNKEVKGAWQKLLGQFSEFTSKLKT

SEQ ID NO: 2323 - protein, 145 aa, Mus musculus
MVMSARNNPDLTPASFVLNGIPGLEHMHIWISFPFCSMYAVAMMGNCGLLYLIFFEDSLHRPMYYFLAMLSLTDLVMCSSTIPKALCIFWFHLKEIGFDDCLVQMFFIHTFMGMESGVLMLMALDHYVAICYPLHYSTILTNPII

SEQ ID NO: 2324 - protein, 215 aa, Mus musculus
LKKNHIRVTKPILLGFTNNSEIQISLFVFFLAIYLVALLGNFLAFTINRVDPTLQTHKYFYLQNLSQLEVCFTLVMIPKMLVDLRKVISFWGCGIRVCSFFFPPSISSSSSALMMALPFSVCVCMCVCVDLVTDASACILFSSSCFTFIIVSYVHIAGTTLRMSFATDGQKAFFICLLYLTVIYYFYVTANLTYRTSSNSSESSSLSYTVFMSML

SEQ ID NO: 2325 - protein, 216 aa, Mus musculus
IKAKIEEENTTEITQFICLGFSDSPEITELLFVLIHTWNMSFIVLIRMDSHLHTPSISFKEIYYISSAIESMLSKFFQEKQTISFVGYMVYFIFFTRVLSESFLVTAMAYDKYAIICNPTALSPIMLPTLCAWVMVESYVTTNSSSLPQICTLLQLYFCGLNINRRFFCDMPQLLNLSYTDKFFVQFLLAIFTRLFRIVNALLISIAYDYVAISVV

SEQ ID NO: 2326 - protein, 315 aa, Mus musculus
MEGMAARNHCVVTEFFLAGLSNKQELQLPLFLLFIRFYVVTVTGNLSIITLIGLNSHLPTPMYYFLSSLSFIDFCQSTVVTPKMPVNFMVEKNIIISYLGCMTQLYCFLIFGIAEGYTLAAMAYDPFVAICNPLLYNATMSSQIYTSLIFSVYIFAVFCISTHVGFMFRIKFCKLDVINHYFCDLLPLLKRACSDTYINEMLIQYFGTTNICIQILTIFTSYIFIIASILCIHSTESRSKAFSTCSSHILAVAVFFGSLAFMYLQPSSVSFMDQGKVFSVFYTIVVPMLNPLIYSLRNKDANVALKKIFERKRFI

SEQ ID NO: 2327 - protein, 277 aa, Mus musculus
MDTGNHSAVTLFVLVGLTQQPELLLPLFILFLGIYVVTAVGNMGMILLITVSPLLYTPMYYFLSSLSCVDLYYSTIITPKMLVNFLGKKILIIYSKCMAQPFLFVVFVVAEGYLLTVMAYDLYVAICRPLLYNVIMSSKHCLLLVLVSFILDIFFSALTHTSAMMNLSFCKSHIIGHSFCDVLPFASLSCSNTRFNKLLFIIGGINTLVTTLAVAISYVFILCSILYISSLKGRSKALGDCSSHVMAVGIFFGSITFIYFKSSKILIFYYFINILFY

SEQ ID NO: 2328 - protein, 183 aa, Mus musculus
PLLYSSIMSQHKCLSLVLVVYIIGIICASAHVGCIFRVDFCRFDVINHCFCDLISILKLSCSNIFVNELLILIFSLINTIFPTLTILISYTFIIISILRIKSTEGRSKAFSTCSSLISAVAVFFGSAAFMYLKPSSSSSINEGKICSIFYTIFVPMLNPLIYSLRNKDVNIAVKKIIERRSFF

SEQ ID NO: 2329 - protein, 307 aa, Mus musculus
FIKQRKIEVGNCSTTEFLLLGITNKPKIKVILFNSFLVYLIILFENLGMIILIRMNTKLHTLMYYFLSQLSFSDISYSTAFGPKMMNSLQLPCICSVFFISNIFTDAECIMLAVMTLDRYNAISNPLMYAADMSQVVCSRLLAVVYLFGMVDALIHTILTFHLCFCGFKEINHFFCDIPPLLSLFSSDIEVNELDIFILCEFTKMSTISVLVFYCYIISLVLKICSAEGRFKAVSTCTSHPTTAVAIFQGMMSIMYFQPSSAYSLHQDKMTSLFYTLVIFMLNAVIYSLRNEDVKASVKSLKSRISD

SEQ ID NO: 2330 - protein, 349 aa, Mus musculus
MEMENVTLLTVFLIEHQPQWKLPLFLSLFVINLISNAWYFSLINFWDDTHFHIPMYLFLSNSPFVNSWLPSELLITFSLSLSVSPSVSVSVSLSVSVSPCLFLSLSVCLSLSLSVSLCLSLSLTLSLSLCLSLSLSLSLSLSLSVSLSPSLRPICCFPFSVSVKCFFTPRARDCYIAICKPLLYPIIMTNSQCFHLEIFSPEGGFLHVLTYEIFLFRITFCNSNVIYHFYCDVIFFFFFKISCSDSSISFLLMFGLADTGWRSTIVSVLGFYIILFTLLLSKCFKGIKKAFSTCGAHVLCASLYYGPLFMYVRLASRYADAEIDSLFYTVIVTMLNIIIYSIKKQIIDS

SEQ ID NO: 2331 - protein, 298 aa, Mus musculus
MEHSNDSKVTEFILLGFAGQNESWHILFAVFLVIYVATLVGNIGMILLIKLHSSLHTPMYFFLQHLAFVDLCYSYAITPSDTGALQNFMSTRPSFPFTGWTMQLYIYGIFINSDFILAARAVDSYVAICNPLHCPIIMSQRWHSGASVNTGFTFYNFCRSNAINHFFCNVPPILTPSCSSTDFNIVLLTVFVGFNFIFSVSVVILSYTHILAAILRMFSAAGRIKAFSTCVTHVTTITILFRTVCYMYVLHGINRSQEQKKVTYVSYFIIIPMLNLLVCSVRNQDMIEVLRHIENKCL

SEQ ID NO: 2332 - protein, 194 aa, Mus musculus
YDRYLAICQPLWRYPVLMSAKLSTLLVAGAWVAGLIHGAIQAILTFRLPYCGPNQVDYFFCDIPAVLKLACADTTVNELFTFVDIGVVVASCFSLILLSYIYIIRAILRIRTADGRRRAFSTCGAHVTMVTVYYVPCAFTYLRPDSHGILDGAAALFPTAITPFLNPLIYTLRNQEVKLALRRMVGSQSTKSGG

SEQ ID NO: 2333 - protein, 310 aa, Mus musculus
VNISLVTEFIVVGAEQPDLQIPMFFGFLAMYPVTALENLFLIILTVLNSHVHTTMYFFLFNLSFVVLCYSSVFTPQMLMNFIIRKNTISYMECITLFFLSFFLSFFLSFFLSFFLSFFLSFFLECCVLTSMAYDSICNPLLYNLFMSPKCLNLILGSFFISFSDAVAHSTCRLKLTFCDCDIPPLLQLCCTSTYVNELVIFVFLVGCINIIVPSSTILISYDFILSSMFCIKSSEGRSKAFSTYSSHVISLSLFFDSSAFVYFKSSSAGSLGEENISSVFYSNVVLIVNPLLYSLRNKDSLRKTLTRKNF

SEQ ID NO: 2334 - protein, 320 aa, Mus musculus
SEPNWTVPQEFVILGFSGWPQGLRVLLFSLLLPLYLATLAGNLLILGLALAEPTLHTPMYFFLGSLSAVEVAYTLVLTPRMLAGFLLPPGGQAVAPSTCAAQMGLFVALGGSECLLLAAMALDRYLAICRPLYYPLMTSGLCWALLACCCLGGSILALGLTMAIFQLPFCHGGLVNHVFCDLPAVLVLACGNRELQEHVLLAACMLLLVLPLILILLSYTRVLVVILGVGDSAGRRKAFNTVASHLTVAVLHYGCATAMYARPLSSRSLEEDKLVSLIYINLTPLLYPAIYTLRNRDMQGALQRVVSQRTMGTVQQADLV

SEQ ID NO: 2335 - protein, 234 aa, Mus musculus
MEQNVSYSRVKEFVCEGLTDSSPKSVWSSFLFLVYTATGLGSLLIMVTATECLLHTPIFSLSVMTFDQYMAISKPLQYVSIMSSRRCQAHIVASWVGNFVHSIVQISLLLPLPFFGPNVVDGFYCDVPQALKLTCTSTFALEVLMIATNGLITTMWFVFLLVTYLATLMVIHRRKVISSCTQITVVTLHFVTCIYVFTALPMDRAVSITFTVIIPVLNPMICTLMSSGFLSLHK

SEQ ID NO: 2336 - protein, 146 aa, Mus musculus
YEKKYTEMTQFILLGFSDFHQITALQFIIFLTNLCLIVLIRMNSHLHTSMVFLCDLSLIGLYYINSMDPKILTPIYSSRSKGSRATFWPPQACTWCICIHTGKNSYTNKFFKSCRKESHFLAMTQETKLFMLLVYIPGVKFYLSSI

SEQ ID NO: 2337 - protein, 245 aa, Mus musculus
GHRKFSLNEFIFAGFANNPEMKGIFVMFLVIYLINLLQTVGMIILMRMDPQLHTSKYFYLSHLSFSDFYYFIAIVLKVSVGIFGNKICLRGCALFFTSCTFADEYIVLAAMSFVRYQAISHSCLHTTQAQQCGYLTADIYLVRTLDALKHFPLAFHLCISESNEINHFFCNLCVLYLLSCSDTQLFNIYDLFVLSTLASILICYCYTISVLEMHFSEWRFKSFSVCTLCLIAFANFQITLIFIYY

SEQ ID NO: 2338 - protein, 218 aa, Mus musculus
KPPIKTFRKKSNQAKRCVLFSEFPDFQWFLIGLLFITYSFILLGNDTIVLITRVVFSFGKFSFLEIWYIYITLPRMVFGTQKRAMSFIACATKLCFTPTLGATKGFLLAVMYNDIYVAVGNPLLYSLLLRLTCGSQLSAGSWFSGMNSGTGRLQTTHKFISLAGSHHTNHIFCDIPYFSLPVKTFINEMVIFLDAVLFCSSFLLLLIIYYKILTLLSK

SEQ ID NO: 2339 - protein, 100 aa, Mus musculus
PSAELTSRGRQSTWSEEPPSAHAQIICLPLRTQLSAPSCNGECGRGSQHNTSVAPLLNPFIYTLRNKQVKEAFKHVLHRFCFLQNNETMFRHAVETSGVK

SEQ ID NO: 2340 - protein, 273 aa, Mus musculus
PTMLFSYICTYSAGEERLFTPLELIGHMVSSFLVLSCYQNVITLLMMMSFVQDNDVTPSLNMTLLSSFLIFVTYVNWWHATMAYDHYAVTSNCLVNNVIMSQVCFWMVSEMHAMGFTEDTIQTLCILRVLLCKGKVMNNCFCDLLPLLPLAYSSTFVNKIVLLYNSAFNMFQPRLTIAPYTFNITCILCIKSTNGRVNAFSSYNSHFFAVVVFLGSLAFIYFQPFICSKKKNKASSLFYTTIVSMLNSLIYGLRNKYVKFTLRKVVKKQNLHV

SEQ ID NO: 2341 - protein, 231 aa, Mus musculus
VVLLILVKNIISKSFIITISSQLHSPVYSLSHLSFINFCYSSVIIPKMLVNFVCEKDMIFLECMIQLYFIIFVIAGGSLLTATTYDCQGPASAQDQSSKLEAGIPGRRITNTHRHLFQEQSLRQVSRLEVALHLFCVSLSLSLSLSSVSVSVCTYSSLSCTLCFSLLHFAFLKLPMFLHTSVYSPFTHTYTIYTHLTHIPLMCSFTHIDTPLTLTLFLYSFSHTPYSSLPF

SEQ ID NO: 2342 - protein, 217 aa, Mus musculus
LFFKFYYSSFFITHRKNNTDLSSFPITSMMYVHYILHYISIMRKELGALLEAVFWILYNASSFTCVFHCCSSVLMACFCDLTAMIKLSCLDTFLKELVMFTVRVAVITLAFICTLVSYGYTGATVLRGPSTMGIYKALYTHGFYLLVVSLYYGGIFGYLFPELSNRMDKDTIIAVMTAVTPMLNLFICNLRNRDTKEALGILLSSKRFYMITSEYFH

SEQ ID NO: 2343 - protein, 311 aa, Mus musculus
MEDKNETIVSEFLFLSLTNRLYQKIILFILLLFIYVITGGGNLGMVTVIWVDPRFHTSMYYFISHLSFVDMCSSSSIAPRMLYDIFTEENKNISFVCCTVLWFAGLFEGTECFLLAAMAYDQYTATCKPLLYTLIMSKRVCAQFVIWPYLLAAINIKTHETLTFCLPFCGSNTINHFFCDISPMLVLACADSSINKIVVFVLDGAIGVFSGVIITVSYISILMAILKIQTTNRRMKDFSTYSSHLAGVSIQYGTVLFIYVRPSTLNTNKVISLFYTVMISMLNPLIYSLRNKEVKNALRRKVQRKHFSRDW

SEQ ID NO: 2344 - protein, 248 aa, Mus musculus
  VARIANT (243)...(248): Any amino acid
MKAFSSPSNSSTITGFILLGFPCHREGQILLFVLFSIVYLLTLMGNASIICAVCYDLASFSFFLSQTVLGNISNNDYGQLYFHTISFCFLFSFIFSVNFLFIYLFIYLIYISNVITFPTFPSNPLCPLPSLLFTNPPIPASWPWHSSILGHRTFTGPGPLLPLMTTRPSSATYASRAMCFLLVVSQGSLGGYWLVHIIVPPMGMRNPFSPCGSLLLLHWGYVFLNSITPTIYATAIFSLVFLXXXXXX

SEQ ID NO: 2345 - protein, 229 aa, Mus musculus
ECWWVLSRTSFSHAECLTQLFFFAFFVIDECYILTAMAYDRYAAICKPLLYQVTMSHQVCLLMTMGVYVMGFAGALSHIVCMLRLTFCDGNIINHYVCDVLPLLKLSCTSTSINEMVVFIVVGVNVIVPSLTLFVSYTLILSNILSIHSAEGRSKAFSTCGSHVMAVSFFFGAAAFMYLKPSSASVDEEKLSTIFYTILGPMLNPFIYSIRNKDVHLALRKTLMKLRFS

SEQ ID NO: 2346 - protein, 268 aa, Mus musculus
GHTSCQSLGQAFILLGLTQQPELQLPLFFQFLGIYVVSIVGNLGLIVLIVLNPHLHTPMYYFLFNLSFTDLCYSSAITPKMLVGFVNQNIIAHAECLTQLFFFCFFVLDECYICTEMAYDRYAAICKTLLNQVTMSHQVCLGNHKRLDYIIFRNGKIKKIFLNVHIYFIIFFVCGTSYPSLSCASVPLTYILRVGTFVSFVWLSQTMSYYFIIANLWDNLESSFRLICCSKGSKEGKKLLSFWSFFIVLKQFRKEGLTSYQPSNIHDS

SEQ ID NO: 2347 - protein, 213 aa, Mus musculus
ESGPLPLPSLVWQQNLSFDQSNCLGYISFSRPLAPLLFQVSKMHFQARTQVVVCWPDTTIRFAGSSVHTGCVFLGHAINHLFNILTLLQLSATTYVNVVILIGVYITVPSFTILISYVFIFINILNIKSMQRISKDFSICRFHIASIYVFIEFTAFKCFKYSYGSIDQGFYSSVFYTDVILILNIIIYSMCIMDVEMALMDALMKFQRNVFHL

SEQ ID NO: 2348 - protein, 274 aa, Mus musculus
LQILWKKKGIAELQLLLFFNLLVVTIVGNLDTLISILFSSQLHTPVVYLLSRLLFIDCSKSTVITPTMLLNFATESVICYECIPQYYFCAFGAAKCVLLAAVAYDLCVAVHNPLLYNLIISYQLWSIVVVVYGRGLLCTVAHTVFVLRVFCFLQDWYIKPLLSGSSTFISELLASAFNLTLLCLGILSYYIFIIFSLFQSIQSTSTDGRSKAFSTCRSSILAVTVFWGYILALSSLDEGKVLTMSYTILESMVKSRIYSLRNKDAKVAMKNYPG

SEQ ID NO: 2349 - protein, 305 aa, Mus musculus
MNARGNSTEITQFILLGVTNLPRIIILLFVTFLLIYITTLTWNLSLIVLIRMDSHLHTPMYFFLYNLSIIGLCYVTCTVPKKMLSNFFQEKQTISFVGCIVQNFIFFTMGLSESCLMAAMAYDRYAAICNPLLYASIMSPTFCVLKVLESYLSGITASLLQLFALFCGTNVIKHFFCGMPQLLVLSCIDTFLTAILTMIFGFVNMLVIMISYGYIVMSILKITSAKGRSKAFNTCAPHLTPVSLFLTSSIFVYLSSSSGGSSSFDRFVSVVYTVVIPVLIPLIYSLKNREIKDAMKRLKKKTICS

SEQ ID NO: 2350 - protein, 283 aa, Mus musculus
TLLLGFPIRPEQQYIFFTLLLAMCLTTVLSSCTSTHLHTLMYLFLIILHIWLDSHPQVPMYFFLSHLASVSSVTVSEMLWSIQTQHLSIPYEGHFSNLVFPYFFYMLDNLLLEMVVYERYVSIHPLYYTIVMREELYDLLVSGCCFISYIHTLLHTLLLCQSIPYHFCYFNEHLKLSCLNTPFNELVIFIEGVLTFLPLGTISGPYICTGATVLKCPSMKNIYKVLHGAFALVLAIIYFFHFSNNSKFKVVIVSVMYTVVTTMLNPFIYSIEIKLAHGPLYRK

SEQ ID NO: 2351 - protein, 304 aa, Mus musculus
  VARIANT (166)...(200): Any amino acid
MENHSLTLVTEFILMGITERPELQAPLFGLFLIIYIFSLVGNLGMIILTMVESRLQTPMYFFLRHLATTDLGYSTAVGPKMLRSFLVDQNRISFHFCAVQFAFFSMFIISEFFILSAMSYDRYVAICKPLLYNVIMSQRVCWVLVTIPYLSIFVALIATINIFSSXXXXXXXXXXXXXXXXXXXXXXXXXXXXXXXXXXXSPLVILVSYLLILRAILRMNSAEGRQKAFSTCGSHLTVVIVFYGTLIFMYVQPKSSHSLNTDNAASIFYTLIILMLNPLIYSLRNKDVKYSIRKTGKTIQNIFS

SEQ ID NO: 2352 - protein, 297 aa, Mus musculus
MEKYNLTMVTEFILVGIPYHPEFQVLLFGLFLIIYLTSLVGNLGMIILAMVDSRLQTPMYFFLRHLATIDLGWSTKMLNNFLVDQNAISFYACAIQLSFFSMFTIKKFFILSAMSYDCYVAFCKPLLYTIIMAIWVMILITIVDSRQKTPMNIILQTCSNYNFHLLNSCQYQNFEIFYCGSKPVSFRLFASQISLLYFPHSLAFYYFIISVTSMWPVAANLCFYGHHIKKSLLVSSGDHLYLTTLPVIMKIKMFTLFFCVHKSSVISNATVFLFNVALFEYSQNTDHLISSAFFPLF

SEQ ID NO: 2353 - protein, 271 aa, Mus musculus
  VARIANT (139)...(145): Any amino acid
MEKQNLTVLSEFILKGITDRPEMQAPLFGLLFIIYLISAVGNLGIIIITNVGSRLCIPMYFFLKHLAFTDLGYSTAIGPKMLVNFVAENNSVSYYLCATQLACFLLFITWELLIFSSMSYDRYVPICNPLLYTGIMSQXXXXXXXEFWVLILTFFIIIILEKKIKVPLLSFRGKGEFKQDLSTLCIEYHVEVSSDHKCVSLSFMMSGKAKETLNCLCSLLTFQKKMGPLCGLFLFFYGVRQAFYFRLQFIYMCCLQMKFDYDIKLLISVHY

SEQ ID NO: 2354 - protein, 268 aa, Mus musculus
  VARIANT (194)...(229): Any amino acid
MDGGNQTIVSEFILQGLANSKNIQVLLFMILLTLYLLIMSGNIVILILITTDPHLLSPMYFLLANMSFVDMWLSSNITPKMITGFLRENKTISFAGCMFQVFFSHCIAAGEMVLLVVMAYDHYVAICKPLHYITIMNLKRCTGLVFTSWIIGFIHGISHLVVVVHLRFCGPKETDSFFCDMPLVIKLACMDSHXXXXXXXXXXXXXXXXXXXXXXXXXXXXXXXXXXXXITVVLYTFPNSHVTWENINKFFPSIHLYAIHTPKLSTSI

SEQ ID NO: 2355 - protein, 231 aa, Mus musculus
  VARIANT (89)...(96): Any amino acid
THTEDSNQTVVSAFIFQGLCTSRQLEIFLLLPFSVLYLMTLVDNLFVVILIITDHHFNSPMYFLSANLSFGDFYLSSVNTPKLTIDLLXXXXXXXXLMSVLLLRNTLTMHSFYKGKHLIGNSLQFQRFISFSSLWVVIAACRYTCTGDIVERSTDRSMHNRKKETLNLKAFEITNPSFSCTLPQTRCMPSNPSQVMPLPNDVFKYISLKVFLFKAFSLIIMNAFSPTSKVS

SEQ ID NO: 2356 - protein, 314 aa, Mus musculus
MKNKSMELDFILLGLTDDPQLQIVVFLFLFLNYVMSLVGNLIIVLLTLLDPRLKTPMYFFLRNFSFLEIMFTTVCIPRFLTTIVTGDKTITYNNCAAQLFFILLLGVTEFYLLAAMSYDRYVAICRPLHYPIIMNSKVCHQLVLSSWVTGFLIIFPPLAMGLKLDFCDSRIIDHFMCETSPILQISCTDTHVLEMMSFVLAVVTLVVTLVLVSLSYSFIIKTIMSFPSAQQRTKAFSTCTSHMFVVSITYGSCIFMYIKPSARERVSVSKGVALLYTSIAPSPEPLLYTLRNQQVKEVFWDVLQKTLGFSKHKV

SEQ ID NO: 2357 - protein, 221 aa, Mus musculus
SYAGCVSQLVFYHFLGGTECFLYTVMAYDRFVAICYPLRYSVIMSHRICAFLAMGTAVFGCIHSTFLTTLTFQLPYCGPKDVNYYFCDIPVVMKLACADTSTLEMVGFISVGLMPLSCFFFILTSYSCIVRSILQIRSTEGRHRAFSTCSAHFTAILLFYMPVIFIYLRPTPSPWLDATVQILNNLVTPMLNPLIYSLRNKEVKSSLWTVLHLLCFLPKHL

SEQ ID NO: 2358 - protein, 199 aa, Mus musculus
ILLTLMGYDRFLAICNPLRYPLLMTNVACGQLVASAWVGGFFISLIETTLIFRVSFCIPNLIRHFFCHMRAVLRLSCTDSNFTEFIVTLMSVSGLLGTFLLILLTYVFILSSVLKIPSAEGKQKAFSTCASHLTVVLIHFGFASVVYMKPENSGGDDTLIAVPYTVITPFLSPIIFTLRNKDMKNAFRKIMRKTVVLKK

SEQ ID NO: 2359 - protein, 182 aa, Mus musculus
RVCILFLVMAWAGGLAHAFVQVLAVYNFPFCGPNIIDHFGCDIYPLLLLACTDTYFLGLSIIGNNGAMCIVIFTLLLLSYGIILRFLKNHSQEGRRKALSTCGSHITVVFLFFVPCIFMYVRPVSSFPIDKFITVIYTIVTPMLNPLIYTLRNSEMKNSMEKLLQKTLSPSRIRLSSCCLCY

SEQ ID NO: 2360 - protein, 154 aa, Mus musculus
TLIISINIIDSNIIDHFGCDVNPLLKISCSDKWLIEQMVICSAVLTFIITLLCAVFSYMYIIRTVLKFPSAQQKRKAFSTCSSHMIVVSITYGSCIFIYIKPSAKEEVTINKCLSGLISSISPMLNPFIYTLRNKQVKQASQDLIKKIAFLLKK

SEQ ID NO: 2361 - protein, 132 aa, Mus musculus
TSLYETLMYACCVLMLLIPISFISVSYTRILITVYHMSSAEGRRKAFTTCSSHIIVVSIFYGAAFYTNVLPHSYHTPEKDKVVSAFYTILTPMLNPLIYSLRNRDVAVALRKVLRKYASSQRLRVRHIPEKY

SEQ ID NO: 2362 - protein, 230 aa, Mus musculus
QVLLIFWFNMKPISFVGCFLQMFVMNTFLPMESSTFLVMAYDRYVAICHPLWFLSIIKKQFVINAGIFIVVRNLLATLPTPVLAARLNYCASNVVENCICANISVAKLSCGDIRLNKLYQFVSVWCLLGSDLVLILLSYCFILRVVMCQQSGGTVTKALSTCGSHLILILFFYTLLLVFIFTNKAGKKIPSEVPILLNVLHHLIPPALNPIVYGVRTQEIKQGIIKLFKH

SEQ ID NO: 2363 - protein, 312 aa, Mus musculus
MNEANYSEVSEFIFLGLSTYRPTQYFLFAFAIISYAATFLGNFSVVFIVIFDPHLHSPMYFLLANLSFVDFCFSTSTVPKLISDLYSGHSIISIQSCIFQMFVLHLLGGCEMVLLVAMAWDRYVAICKPLYYLTIMNPRMCLLLLISAWIIGLIHSVAQLAFVVHLPFCASNEIDSFYCDLPRFIKMACINTYRMEFLVTADSGFISLSTFFLLIISYIFILFIVRKQSLGSLSKAFSTLSAHICVVVLFFGPCIFVYIWPFPTVPVDKFLAILDFMIIPILNPAIYTLRNKDMKVAMRRLSVQLLSRKSIC

SEQ ID NO: 2364 - protein, 227 aa, Mus musculus
MEDSNQTVVSEFIFQGLCTSRQLEIFLLLPFSVLYLVTLVGNLFVVILIIIDHHLHSPMYFLLANLSFVDFCLSSVNTPKLTIDLLKENKTISFGGCMSQILCVHFFGGSEMVLLVTMAYDRYVAICRPLHYSSIMDRQKCIWLVVISWIVGFVHAISQLLLILDLPFCGPRVIDSFFCDIPLVMKLACMNTDTLEILINADSGILATTCFTLLLISYTYILLTVQH

SEQ ID NO: 2365 - protein, 271 aa, Mus musculus
MAIIGEENMTQISEIILLGFGDLHGLQFLLFGLFLAIYVMTLLGNIVILTVVSTDCSLHTPMYFFLGHFSFLEISYTTTIEPVMLWTLLSAHVPISLPACACQFYFFASLVATECFLLAVMSYDRYIAICNPLHYSSIMDSWGCFQLALASWLAGFLAPILLMILIFRLTFCSANEIDHFFCDLKPIMKLACTNTQVAEMTSFICTSLFALGPFILTLASYIHIICTILRIPSTTGKQRAFSTCSSHLIVVSLYYGTLGIVYGFPSMPQYE

SEQ ID NO: 2366 - protein, 134 aa, Mus musculus
KLPCGNVKVNAIYGLMVALLIGGFDILCITISYIMILRAVVSLSSADARQKAFSTCTAHICAIVFSYSPTFLSFFSHHFGGHTIPPSCHIIVANIYLLLPPTMNPVVYGVKTKQIQDCVIRIFSESKDSKAHGI

SEQ ID NO: 2367 - protein, 125 aa, Mus musculus
LACQDTGRNRGPRCLWPEPIILVFPATLILGSYGHIAKAVLKVKSTAGRRKAFGTCGSHLLVVSLFYGSAIYTYLQPKSSYSESDGKFVALFYTIVTPMLNPLIYTLRNKDVKGALWKVLGRGTD

SEQ ID NO: 2368 - protein, 258 aa, Mus musculus
WTSGLRTPMYFFLRQLALVEICFSLDVAPRLLVTLLQPGRGVSPTSCALQLLLVLSCVTSECFLLMVMAWDRFLAICRPLRYGAIMSPQLCYLLATTCWLAGIPVALVFTIWLFNFPFCGPRGIRHFFCDIAPLLSLVCADTRVFEANVFVATVLVIMVPFCLIATSYVMILVAVLRMPSASGRHKALSTCASHLIVVILFYGTTGVIHLRPKASYSPESKQVVSLSYTMVTPMLNPLIYSLRNKEVKAAFGRVCCGR

SEQ ID NO: 2369 - protein, 233 aa, Mus musculus
PQMLAIFWFRVLFLAFDACLAQLFFIHILQGMESGILLAMAFDRYIAICDPLRHTSILKPSILGRMIVVVVIQAVVLVGLLPILIKRLHHFQSIQIAHSYCEHMTVVKLAANRVQVNKICGLFVGLSVLGFDMFFILISYALIFAVFHLKQKEARLKAFNTCTAHIFVFLEFYILAFFSFLSHRLGHVVPSTHILLSTIYLLLPPALNPIVYGVKSMVIKRVAQIFFLDHAHQ

SEQ ID NO: 2370 - protein, 180 aa, Mus musculus
MLSSLKTNNVTYLNPGTVILIGIPGLEHVQFWIGFPFFTVCLVALLGNIILLIIIPAEHSLHQPMYIFLAVLAATDIGLCAAIAPKMLAIFWFRAYSMAFDACLAQLFFIHTLQGMESGILLAMAFDRYIAICDPLRHTSILTPLLGRMIVVVVIRAVVLVGLLPIVIKRLHHFRSIQIA

SEQ ID NO: 2371 - protein, 312 aa, Mus musculus
IEKHNLTMVTEFILVGITDHPELQAPLFGLFLLIYLISLIGNLGMIIFTMVNSRLKTPMYFFLRHLATTVLGYSTAVGPKMLQNFLVDQNTISFHLCAIQLSFFSMFIACEIYILSAMSYDHYVAICKPLFYMVIMSKRLCWVLVVIPYVYCTIVALLITIKIFTLSFCGSNVISHFYCDSLPLLSLVCSNTQEIEVVLLYLSAFNLISSLLLVLVSYLLILIAILRMNSAEGRRKAFSTGSHLTMVTVFYGTLIFMYMQPKSNHSFDTDKVASIFYTMVIPMFNPLIYSLRNKDVKDALLRTWKKKYMVFF

SEQ ID NO: 2372 - protein, 314 aa, Mus musculus
MGQQNTTSLPGFILMGITQRTELQLPLFGAFFIIYAVTVMGNLGMIILTKLDSHLETPMYFFIRHLAFIDLGNSTVICPKMLVDFVMNDKTISFCECATQLSFLPVMFIITEFFILSAMAYDRYVAICNPLLYSVIMSQRLCHVLVGIPYLYSTVQALLVTSRIFTSTFCGSNIISHFYCDGIFLLPMLCSNAEEIQLVIISFSALNLISSFLVVLGSYVLILIAICRMHSAEGRRKAFSTCGSHLTVVVVFYGTLFFMYLQPKSTDSLENDKIASVFYTLVIPMLNPLIYSLRNKEVKNAFYRVLKGQFKINT

SEQ ID NO: 2373 - protein, 305 aa, Mus musculus
MELNRTQLTEFVLRGITDRSELQVPLFLVFFLIYVITMVGNLGLIFVIWKDPHLHTPMYLFLGNLAFADACNSSSVTPKMLMKFLNKNDMISMGECFAQFYFFCSSVTAEAFILVAMAYDRYVAICKPLLYVVVMSNRLCIQFIGVSYLIGLLHGLLHVGLLFRLTFCSSNVIDHFYCDILPLYRISCTDPSINVLVAFIMGILIQVSTFMSIIVSYVRVLFAILRTKSERGRNKAFSTCSSHLSSVSLFYGTLFIIYVLSGSDTDNYQGKMYSLFYTIIIPLLNPFIYSLRNKEVIGALRKLRE

SEQ ID NO: 2374 - protein, 272 aa, Mus musculus
MEMDNTTLLIQFVLSGLVHLPQWKIPLFLLFLVIYLITIVGNLGLITLIWNDPHLHIPMYFFLGSLAFVDTWLSSTVTPKMLQDIFAKNKMISFSECMIQFFSFGISATTECFLLASMAYDRYVAICKPLLYPVIMTNRLCVRLLTLSFVGGFIHALIHEGFLFRLIFCSSHIIDHFYCDVMPLLKISCNDPSINYLMLFIFSGSIQVFTITTILVSYTLVLFSILKQKSLKSIKKAFSTCGAHLLSVSLYYGPLLFMYVRPASPQVNDEDM

SEQ ID NO: 2375 - protein, 156 aa, Mus musculus
LMHTLLAARLSFCENNVILNFFCDLFVLLKLACSDTYVNELMIFIMSSLLIVIPFFLIVMSYARIIASILKVPSIQGIYKVFSTCGSHLSVVTLFYGTIIGLYLCPSGNNSTVKGTVMAMMYTVVTPMLNPFIYSLRNRDMKRALIRVICSKKISL

SEQ ID NO: 2376 - protein, 152 aa, Mus musculus
MDYLNTSSEEGFILVGFSDWPHLEPILFAFISMFYSLTLFGNTVIIILSQLDLRLHTPMYYFLCHLSFLDLCYTASTVPQLLVNLSGLDRTISFGRCVAQLFIMLSLGGIECVLLVAMAIDRYAAVCRPLHYTTIMHPVLCRALVVFSWVGG

SEQ ID NO: 2377 - protein, 191 aa, Mus musculus
MALRNASSVKEFILLGLTQQPGLQLPLFFLFLGIYVVSMLGNLGLIVLIVLNPHLHTPMYYFLFNLSFIDLCYSSVITPRMLVGFVKQNIISHAECLTQLFFFAFFVIDECYILTAMAYDRYAAICKPLLYQVTMSHQVCLLMTMGVYVMGLAGALSHIVCMLRLTFCDGNIINHYVCDVLPLLKLSCTST

SEQ ID NO: 2378 - protein, 210 aa, Mus musculus
MKYLNTSSEDGFILVGFSDWPHVEPILFAIISIFSSLTLFGNTVITILSLDLHLHTPMYCFLCHLSFLDLCYTASTVPQLLVNLSGLDRTISFGKCVAQLCIVLSLGGTECVLLVTMAIDCYAAVCRPLHYTTIMHPVLCRALVVFSWVGGLVNSLIQTSLVMAMPLCGHQLNHFFCELPVLLKMACEDTGGTEVNSFVARVIILVCPLL

SEQ ID NO: 2379 - protein, 177 aa, Mus musculus
SHKVCWLLVTMTYLYCTFMSLVVTINIFSLSFCGYNVINHFFCDCIPLISLLCSNTQEVELIVMFFAAFDLISSLVVVLMYYLLIFIAVLRMNSAEGRRKAFSTCGSHLTVVTLFYGTLIFMYVKPVSSHSIDTEKISSILYTLIIPLLNPLVYSLRNKDVKEALQRTCQKIFNTFS

SEQ ID NO: 2380 - protein, 129 aa, Mus musculus
LNQLSQLTCSDSFSSQLIMNLVPVLLAVISFSSILYSYFKIVSSICSISSVQGKYKAFSTCVSHLSIVSLFYSTGLGVYVSSVVIQSSHSAARASVMYTVVTPMLNPFIYSLRNKDVKKAVERLLEGKL

SEQ ID NO: 2381 - protein, 168 aa, Mus musculus
MAKNNATTINGFILMGFSDHPKEIPLLLVFLSFYLVTMLGNLGMVIFIHVDVQLHIPMYFFLSHLSVLDACYTSVITPQILATLATGKTVISYGCCATQFFFFTIYAGTECFTNTFSLSFCENQSIFFFFYDLPPLLKLACSDTINMVEIIIVFFGNFVILANYCVPL

SEQ ID NO: 2382 - protein, 109 aa, Mus musculus
LVLAFHSQYRSHLILYLLIIRVVMRMKSSGRRAKTFSTCVSHLTAVALLLGTLGFMYIRSGSEDKGMSVFYTVVIPMLNPLIYSLRNKDVKAAFKKITGKCQFSHSTQH

SEQ ID NO: 2383 - protein, 194 aa, Mus musculus
RYVAICTPLRYAIIITPKLCTQLSTGSFTLGFLMLLPEIVWISTLPFCGPNQIHQLFCDLEPMLLLACTDTSMILVEDVIHAISILSCVSIISLSYLRIITVVLKIPSGESRQKAFSTCTAHITIFVLFFGSVALMYLRFSVTFQPLLEKVIALMFAVLAPFFNPIIYSLRNKDMKDAIKKMFGSQKILTVSGS

SEQ ID NO: 2384 - protein, 164 aa, Mus musculus
MTARNMTTMSGFLLVGFSDNHELQILQALLFLVTYLLGSAGNFIIITITTLDPQLQSPMYYFLKHLSILDLSSLSVTIPQYVDSSLARSGYISYAQCMLQIFFFASFAWGELGTLTVMSYDRYVAICLPLHYEVIMSPRKCTWAVAAVWLSGRYLGTLFTASTL

SEQ ID NO: 2385 - protein, 106 aa, Mus musculus
LYGGINFLLTLLSYGCIIASILHMRSAEGKRKAFSTCSSHLIVVSVYYSSLFCAYISPASSYSPERSKFTSFFYSVLSPTLNPLIYTLRNKDVKLALRRLLPSLSN

SEQ ID NO: 2386 - protein, 302 aa, Mus musculus
EKKNHTVVSEFLFQGFSSFQEYKFTLFMVFLTLYLLTLTSNAIIMIIIGIECHRHTPMYFFLSMISTSETVYTLVIVPSMLASLVGSSQSISLAGCATQMFVFITLAINNCFLLTAMGYDRYVAICNPLRSSVIMNKRVCAQLVWGSCNIGLQIASVFRAPFCDREVAHYFCDPVMKLSCADTTLHDIVNFIISSLVIVVPMGLVFISYILIISTILKIASAEGRKKAFATCASHLTVVIIHYGCASIAYLKPKSENTRDQDQLISVTYTVFNPLLNPVVYTLRNKEVKDAIYRAIGKKPFA

SEQ ID NO: 2387 - protein, 238 aa, Mus musculus
MEPYNLTGTLEFILLGLSEDPELQLILFALFLLIYMLTVLGNVLIILAISSDSHLHSPMYFFLYNLSLSDMGFSSTTIPKMLINLHAHNRSITYAECLTQVSFFFLFGGMDSLLLAVMAYDRWVAICHPLYYQVILSPCLCRCLVIVSLFISLVSSQVHCLLVSQLTFCINVEIPHFFCDVPELVKLACSNTTISDIVIFLLGIILGFLPASGIFYSYYKITSSIFRVPSLLGKYKAF

SEQ ID NO: 2388 - protein, 290 aa, Mus musculus
  VARIANT (186)...(208): Any amino acid
MRGDNHSCFWDTPKDFILLGISDRPWLELPVFAVLLVFYILAMLGNISIILVSQLDPQLHSPMYIFLSHLSFLDLCYTTTTVPQMLFNMGSSQKTISYGGCTVQYAIFHWLGCTECVVLAAMALDRYVAICEPLRYAIIMHRPLCQQLVAMAWLSGFGNSLVQVILTVQLPFCGRQVLNNFFCEVXXXXXXXXXXXXXXXXFXXXXXXGRHKAFGTCSSHLLVVSLFYLPAIYMYLQPPSSYSQEQGKFISLFYSIITPTLNPFIYTLRNKDVKGALRRLLARTGRLCGR

SEQ ID NO: 2389 - protein, 250 aa, Mus musculus
LSFIDICYSSSISPRILSDFLKTEKTISFIACATQNFVLAWMGASECCLLAAMAYDRYVAIGSPLQYSAIMAPSLCWRMVAGVYGSGFFISFVQQSACFNLYYCGPNVIRHFFCDIPQIIPLSCSDPFISQLVLFLAALFVGFGSFLVIIFSYVFIAVSILKVASFEGRVKAFKTCGSHLAAVTLFYGTGLSVYMHHSSQHSTKQDKVLSVVYTILIPMVNPLIYSLRNTEIKEALKRVLKKAAHLPQKA

SEQ ID NO: 2390 - protein, 301 aa, Mus musculus
MWPSVIAIYLFGWDSQVSRDFKTVFLFPVLTYMLSIGGNQNTDAFTLHESHFQVPMHFVFRSFSFLEISLTSTFIPQLLFSVSTGIKTISFVGCFIAIFFGTTEIWTLTSMTCDYYIATSQSLHYATIMSNRVCTLLIPCSCLSCFLIIFLPIILTSQLDFCASNVLKHHCCDYGTLIEIACSSTRLMELFVFFLVIMTLRVAMVLVALSYMCSIRTIPKIPSAQRKKAFCSSHTLVISISYRSCIFMCIKPSSRGVVLSKGMAVLNTSVAPLLDLFIYTFRNKQLKKSFNDITRKTVILQ

SEQ ID NO: 2391 - protein, 304 aa, Mus musculus
FTEVIEFVFLGFSSFGKHQITLFVVFLTIYILTLAGNIIIVTITHIDHHLHTPMYFFLSMLASSETVYTLVIVPRMLSSLIFYNLPISLAGCATQMFFFVTLATNNCFLLTAMGYDRYVAICNPLRYTIIMSKGMCALLVCGSLGTGLVMAVLHVPAMFHLPFCGTVVEHFFCDIYPVMKLSCVDTTVNEIINYGVSSFVILVPIGLIFISYVLIVSSILKIVSTEGQKKAFATCASHLTVVIVHYGCASIAYLKPKSESSVEKDLLLSVTYTIITPLLNPVVYSLRNKEVKDALCRAVGRNTS

SEQ ID NO: 2392 - protein, 160 aa, Mus musculus
IVSLLVNIKIFTLSFCGYNVIRHFYCDALPLLTLACSNTHEIEAIILIFSAFNLLSSLLIVIGSYLLILMAILRINSAEGKWKAFSTCGSHLTVVIVFYGTLIFMYLQPTFTHSIDTGKVISIFYTQVIPMLNPLTYSLRNKDVKDVLKKPMEKVHNLFS

SEQ ID NO: 2393 - protein, 115 aa, Mus musculus
ILIFSAFNLLSSLLIVIGSYLLILMTILRINSAKGKWKAFSTCGSHLTVVIVFYGTLIFMYLQPTSTHSINTVKVTSIFYTQVIPMLNPLIYSLRNKDVKDVLKKTKEKVYNLVS

SEQ ID NO: 2394 - protein, 242 aa, Mus musculus
MEDMAAGNHCTVTEFFLAGLSEKPELQLPLFLLFTGIYLITMAGNLGMITLIGLSSHLHTPMYYFLSSLSFIDFCQSTVVIPKMLVSFLTEMNIISYSECMAQLYFFLTFGIAECYTLAAMAYDRYVAICNPLLYNVTMSYQIYSSLISGVYIFAVICSSFNTGFMLRTQFCNLDVINHYFCDLLPLLNLASSNTYINEILILFFATLNSFVPVLTIITSYIFIIVTILSIHSREGKFKAFS

SEQ ID NO: 2395 - protein, 196 aa, Mus musculus
MSNSTLVTEFMLEDFAENWELRILLSVLFLLVYLYSLIGNLIIIIATTVDQTLNTPMYFFLRNLSILDICYVSVTVPNACINSLTDHRNISVGGCAAQIFFVYICACVEILFLTIMAQDRYVAICKPLLYPVIMNHWFCVQMTLASLLSSLVLASVHTFKTFQLSFCHSNVVPQFFCDIPSLLRLYLLLIPLITNS

SEQ ID NO: 2396 - protein, 177 aa, Mus musculus
MASHNFTMVTEFILVANTDCPELQVPLFGLFPIIYLIILVGNLGMIILTMVDSRLQTPMYFFLRHLATTYSTAVGPKMLRNFLVEQNKKLFYDCAFQSSFFSSLLVNFFILYAIFYDCYVAICKPLNYNVIMSQRLCWILVAVPYLYSIFVALIVTINIFPSSFCGPNIINHFFYNG

SEQ ID NO: 2397 - protein, 215 aa, Mus musculus
MFFVASMMGNSLIVFTVASDPHLHSPMYFLLANLSFIDLGVSSVSSPKMLYDLFRKHKVISFTGCVTQIFFIHVIGGVEMVLLIAMAFDRYVAICKPLHYLTIMSPRTCILFSVTAWVVGLMHSLIQLAFVVNLPFCGPNVLDSFYCDLPRFIKLACIDTNQLEFMVTVNSGFISVGSFFILIISYIVIIISVQKHSSGGSSKALSTLSAHITVV

SEQ ID NO: 2398 - protein, 158 aa, Mus musculus
MPSRSVLGDGNHTSVAMFVLLGLLDQAELQLILFPVFLGTYLITLIWNLGLIILIRMDSHLQTPMYFFLSFLSFIDICYSSSISPRMLSDFLKAEKTISFIACATQYFVMAWMGASECCLLAAMAYDRYVAIGSPLQYSVIMAPSLCWRMVAGVYRSG

SEQ ID NO: 2399 - protein, 139 aa, Mus musculus
MPSISVLGDGNHTSVAMFVLLGLLDQAELQLILFPVFLGTYLITLIWNLGLIILIRMDSHLQTPMYFFLSFLSFIDICYSSSISPRMLSDFLKTEKTISFIACATQNFVLDWMGTSECCLLTAMAYDRYVAIGSPLQYS

SEQ ID NO: 2400 - protein, 157 aa, Mus musculus
RTKNHTVVTEFILMGITDHPDLQPSLFGLFLLIYLISLVGNLGMIILTMVDSRLQTPMYFFLRQLATTDLGYSTAVGPKMLTNFIVDQNRIFFNLCTTQLAFFLLFIACELFILSAMSYDRYVAICKPLFYMVIMSKRLCWVLVVMPLCLLYNCGCF

SEQ ID NO: 2401 - protein, 194 aa, Mus musculus
FLAVMAFDRYLAICRPLHYPSLMTGRLRNTLVTSCWVLGFLWFPVPIIIISQMSFCGSRIIDHFLCDPGPLLALACSRVPLIEVFWSIIMSMLLVIPFLFIMGTYILVLRAVFRLPSREGQKKAFSTCGSHLTVVSLFYCSVMIMYLSPTSEHEAGMQKLVTLFYSVGTPLLNPMIYSLRNKDMKNALQKILRT

SEQ ID NO: 2402 - protein, 179 aa, Mus musculus
FLLSVMAYDRYVAICNPLLYPVMMSNSLCMKFIHVSYIVGFLHSAIHVGLLVRLNFCKSNIIHYFYCEILQLFKISCINPTMNVLLVLIFSTLIQGLTFMTFIVSYSSVIFPILKTKSERGRRKAFSTCSAHLLSVSLFYGTLFLMYVHPGSGSGEDKGRMYSLFYTIIILFLNPFFIT

SEQ ID NO: 2403 - protein, 262 aa, Mus musculus
THSCTLPMYFFLSTLSLLDMSYVTTMPQMLVHLLAHSQTISFAGCCLQMYVFGALGMTECTFFVVMAYHRYVAICPLPYTVILNWGLCMRLAAGSWICGFFSSLLHTFFTMSLPYCGPNRVNHYLCEGPSVRSLVCMDTHFVEMVDLVLSVFLVVIPISLIVASYIHIAMAILKIKSTEGRCKSFSTCASLLTVVTLFYISATYNYMRPNSSYSPEDKQISLFYNAFTPLLNPVAYSLRNKNIKRAFLKVISYSRWAGGPGW

SEQ ID NO: 2404 - protein, 225 aa, Mus musculus
MEQSNDTKVTEFILLGFAGQHKSWHILFIIFLMIYVVTLMGNIGMIVLIKIDSSLHTPMYFFLQHLAFVDLCYTSAITPKMLKNFTETKASISFIGCMLQLLAYGTFATIDCFILAAMAVDRYVAICNPLRYPIVMSQRLCILLLVGSYTMGFLNASVNTSFTFSLKFCKSNAINHFFCDEPPILALSCSSIDFSIMLLTVFVGFNLVETVLVVIFSYIYILSAI

SEQ ID NO: 2405 - protein, 155 aa, Mus musculus
LMLFLKLDFCASNVIDHFCCDYFPILQLSCSDTWFLETIGFYFAFITLLFTLALVILSYICIINTILRFPSASQRKKAFSTCSSHMIVISISYGSCIFMYVKPSANERASLTKGVALLNTSIAPMLNPFIYTLRNQQVKQAFKDLINKLMFNRNK

SEQ ID NO: 2406 - protein, 214 aa, Mus musculus
DLAIGQYCMLHEFILTELSKKLDSQLPFSSTFIGTYALTLVGNLGRFTLNQSFHLHKPMYYFFSNIYSINLCHPMVVNPKMFGKFVIENNPISHPQYMTQLYFILSFVTAKCHLLAAISYEPHVAIYNPLVYNVTIFSQIYSSLISEVHITGVVCISGHTGIKISVLGNIGVIKYHFYVLTQNSPTYVKVLVFLLFYLIIFHPIHSLIKLKFFF

SEQ ID NO: 2407 - protein, 124 aa, Mus musculus
MAEGNSSTVFQFILEGLTDDPELEVTLFAVFLVIYLTTVLGNLGLIMLIQVSPQLHTPMYFFLCHLAFVDFCYTSSVTPNTIINFLREIKSITLYACATQVCCFITFAVCEMYLLSVMAYDRYV

SEQ ID NO: 2408 - protein, 317 aa, Mus musculus
MKNYNSSLGFLPTTFILVGIPGLETEHIWISIPFCLMYFIIFLGNGTILHVIRTDASLHQPMYLFLAMLALAEVGVSASTLPTVLGIFLFDTSEITFEACLLQMFFIHSFSIMESAVLLAMSVDRFVAIYSPLRYTTILTLPRIFGTGAVIGLKSVILMAPLPILLRRLPFCGHNALSHSYCLHPNLIHLPCGDISIDNIYGLFIVTSTFGLDSLLIVVSYGLILHTVLGIATGDGRRKALNTCGSHVCAVLAYYVPMIGLSMVHRFAHHVSPLLQTMMANAYLFFPPVINPIVYSIKTKEIRRGIVRMLSEKRFRV

SEQ ID NO: 2409 - protein, 322 aa, Mus musculus
MPQPLVPLIATPNGSLAHPAYFLLVGIPGLGSKIHFWLAFPLCFMYAVATLGNLAIIFIIRVERRLHEPMYLFLAMLSTIDLVLSSVTMPKMASLFLTGIQEIEFNICLTQMFLIHALSAMESAVLLAMAFDRFVAICYPLRHASVLTGTTVAKIGLASLARGFVFFFPLPFLLKRLSYCQTHTVTHSFCLHQDIMKLSCTDTKVNVVYGLFIILSVMGVDSLFIGFSYILILRAVLELSTRGAALKAFNTCISHLCAVLVFYVPLIGLSVVHRLGGPTSLVHVIMANIYLLLPPVVNPIVYGAKTKEIRSRVIRMFSQDGR

SEQ ID NO: 2410 - protein, 346 aa, Mus musculus
MFFRVCLQVTMLIFNNTTSPSSSSFLLTAFPGLELAHVWISIPVCGLYTIALLGNSIILFVIIIERSLHKPMYYFLSMLSVVDLGLTITTLPTVLGVLWFHAREISIKVCLIQMFFVHGFSFLESSVLVAMAFDRYLAICSPLKYATFLTDMMSFVIGLIICIRQVVFMFPSVMAVKSVSFQGGQELSHPFCFHPDIIKFTYTNPWISSFWGMFLQLYLNGTDLLFILFSYVLILRTVLNIVAPQKQQKALSTCVCHICAVTIFYVPMITLSVAHRLFSSTPRVICSILGNMYLLLPPVLNPIIYSLKTKVIRQAIFQLFRFKDARGYIMRSLRGRWARRRQFSST

SEQ ID NO: 2411 - protein, 330 aa, Mus musculus
MSTFQNTTASSIIFLLTGVPGLEAFHTWISIPFCFLYATALSGNSLILFVIITQPSLHEPMCYFLSMLSTTDLGLSISTLATMLGIFWFNAREISFNACLSQMFFIQLFTVMESSVLLAMAFDRYVAISNPLRYASVLTDLKIAQIGVAIVTRGTLILTPMVVLLKRLSYCSSHVLHHSYCFHPDVMKLSCTDTRINSAVGLTALISTAGVDSVFIILSYVLIIRTVLSIASPEERKKAFSTCISHIGAVAVFYIPLISLSFVHRFGKRAPPYVHTLIANAYLLIPPVMNPIIYSVKTKKIRKAVLKVFHSSMTRASLLFHRFSTLSFYE

SEQ ID NO: 2412 - protein, 309 aa, Mus musculus
VLLNHTLVTEFLLLGVTDIQELNPILFVTVLAMYFVNVAGNGAILMIVISDPRLHLPMYFFLGNLACLDICFSTVTVPKMLENFFSTSKAISFLGCITQLHFFHFLGSTEALLLTVMAFDRFVAICRPLHYPAIMNSQICILVAISIWAIPFLHALVHSILTSQLNFCGSNHIHHFFCDVKPLLELACGNTELNRWLLNTLTGTVAIGLFFLTFLSYFYIVTYLFLKTRSCSMLHKALSTCASHFMVVMIFYAPVLFIYINPDSGSSLEKDRIIAVMYTVVTPALNPLIYTLRNKEVRGALNRKIRILL

SEQ ID NO: 2413 - protein, 312 aa, Mus musculus
MSSINSTQFHPSFFILVGIPGLEIFHIWIAFPFCLVYLTSLVGNITILFVIKTEHSLHQPMFYFLATLSIIDLCLSTSTIPKMLGIFWFNLREISFGGCLAQMFFIHVFTGMETVLLVVMAYDRFVAICKPLQYTTILTNKTISLLLSVVIGRNLILVTPFVFLILRLPFCGHHIMPHTYCEHMGLARLACAPIKINIIYGLVVISHILVDMILIASSYVLILRAVFRIPSQDARLKALNTCGSHVCIMLCFYTPALFSFMTHRFGQNIPHYIHILLANLYVVIPPALNPVIYGVRTKQIREKIIKIVVQKE

SEQ ID NO: 2414 - protein, 312 aa, Mus musculus
MEKWNQSSSDFILLGLLPQNQTGLLLMMLIILVFFLALFGNSAMIHLIRVDPRLHTPMYFLLSQLSLMDLMYISTTVPKMAFNFLSGQKNISFLGCGVQSFFFLTMAGSEGLLLASMAYDRFVAICHPLHYPIRMSKIMCLKMIIGSWILGSINSLAHSIYALHIPYCHSRSINHFFCDVPAMLPLACMDTWVYEYMVFVSTSLFLLLPFLGITASYGRVLFAVFHMRSKEGKKKAFTTCSTHLTVVTFYYAPFVYTYLRPRSLRSPTEDKILTVFYTILTPMLNPIIYSLRNKEVLGAMTRVLGTFSSMKP

SEQ ID NO: 2415 - protein, 321 aa, Mus musculus
MENIACNGSGNSQTSFYLTGIPSLQKSLFLPVFLIFLLLYLLILVGNALILVAVVAERSLHKPMYFFLINLSALDILFTTTTVPKMLSLLLLGDRFLSFPACFLQMYLFHSFSCSEAFILVVMAYDRYVAICRPLHYPVHMTPQTNTALAASAWITALLLPIPAVIQTSQMAFDNIAYIYHCFCDHLAVVQASCSDTTPQTLMGFCIAMVVSFLPLLLVLLSYARILSSVLRINSKEGRSKAFSTCSSHLLVVGTYYSSIAIAYVAYRADLPVDFHIMGNVVYAILTPVLNPLIYTLRNKDVKSAITKMMCHQDPKSIGKP

SEQ ID NO: 2416 - protein, 329 aa, Mus musculus
MRPKLHPYRMAESSQSNSTFQHPAFFILTGIPALGDGQAWLSLVFGLMYLLALLGNATLLTVIRIDSTLHQPMFLLLATLAATDLGLATSIAPELLAVLWLGPQPVQYTACLIQMFFVHALTAMESGVLLAMACDRAVAVGRPLHYPILVTKARVGYAVLALTLKVLAVIVPFPLLVVRFKHFHAKIIHHAYCAHMAVVELVVGNTWVNNMYGLALSLAVSGVDILGIAGSYGLIAHAVLRLPTQEARVKAFGTCSSHICVILAFYVPGLFSFLTHRFGRHTVPKPVHILLSIIYLLLPPALNPLIYGVRTKQIRDRFLEMFKFRKKQF

SEQ ID NO: 2417 - protein, 322 aa, Mus musculus
MGEDGNTSIFNLSYSSFLLVGFPGLQEGRPLLVLPLTFLYVSIVSANALVIHTVVAQRSLHQPMYVLIALLLAVNICASTAVMPKMLEGFVHYANPISLRGCLTQMFFIYFTLLLDYNLLLAMALDRYVAICHPLRYTDLMTSHLLGLMATFAITRSLGVAVPLVVLTAKAQFCKTSVIRHFTCEYIALLSIACGDLTFNNRLGLAMRLVTVTFDLALLGTSYTRIIYAAFRISSGGARAKALHTCGSHLLVILTIYLSGLSTSIVFRVAKTVSQDVQNLLSAIYLLLPGALNPLIYGVRTKEIRQHIEKMLCGMQSPQDSR

SEQ ID NO: 2418 - protein, 312 aa, Mus musculus
MFNSSQFTPKYFLLTGFPGLEAWYPWLIFPFCFTYTIGIMGNTLILAVIRKNSSLHQPMFLFLAMLAFSELGVSASTLPTVLSIFLLGANKICFEACLLQMFSIHSFSIMESGVLLAMSVDRFVAIYNPLRYTAILTLPRIAGTSLTLGLKSLLLMFPLPFLLKRLPFCGHNVLSHSYCLHSDLIQLPCGDTRPNSILGLCIVTSTFGLDSLLIVVSYVLILYTVLNITSGEGRRKALNTCVSHMCAVLVYYVPMISVALVHRFMKHAVPAVRLLLANIYLLVPPMLNPIIYSAKNRQIRQGLIQLFLQRKY

SEQ ID NO: 2419 - protein, 320 aa, Mus musculus
LDTKRATNSSEFQVSEFILLGFPGIHEFQIWLSLPMALLYIVALGANLLILITIYLEPTLHQPMYQFLGILAAVDIGLATTSMPKILAILWFDAKTISLPECFAQIYAIHTFMCMESGVFLCMAIDRYVAICYPLQYPSIVTEAFVIKATLSMLLRNGLLTIPVPVLAAQRQYCSRNEIDHCLCSNLGVISLACDDITVNRFYQLALAWLVVGSDMILVYASYALIIRSVLRLNSTEAASKALSTCSSHLILIMFYYTAIVIVSVTHLAGRRVPLIPVLLNVMHIVIPPSLNPMVYALRTQELKVGFRKVFESLCVQKVN

SEQ ID NO: 2420 - protein, 322 aa, Mus musculus
NRSQTADPKNSSTVTEFILVGFEQSSPSTRALLFTLFLALYSLAMAMNGLIIFITWTDPRLNSPMYFFLGHLSFLDVCFITTTIPQMLVHLVTKNHTVSFVSCMTQMYLVFLVGVAECILLAFMAYDRYVAICHPLNYAQIMSQKVCVRLVCSSWIFGMVNGIFLEYISFRNPFCKDNHIENFFCEAPIVIALSCGDLKFTMKLIFVDAIVVLLSPMVLIITSYARILASILRRASSSGRGKTFSTCASHLTVVVFFYTSAMFSYMNPRSTHGPDKDKPFSLLYTIITPMCNPVIYSFRNKEMKGAMGRALGIGSLAQAESV

SEQ ID NO: 2421 - protein, 322 aa, Mus musculus
RPQKGDSRNSSSTVTEFILVGFEQSSPSTRALLFTLFLALYSLAMAMNGLIIFITWTDPRLNSPMYFFLGHLSFLDVCFITTTIPQMLVHLVTKNHTVSFASCLTQMYLVFGVGVAECILLAFMAYDRYVAICHPLNYAQIMSQKVCVRLVCSSWIFGMVNGILLDYMTFRGPFCRENHIENFFCEAPIVIALSCGDPEFSLKVIFMDAIVVLLSPMVLIVTSYARILASILRRASSAGRGKTFSTCASHLTVVVFFYTSAMFSYMNPRSTHGPDKDKPFSLLYTIITPMCNPVIYSFRNKEMKGAMGRALGRGSLAQAESV

SEQ ID NO: 2422 - protein, 308 aa, Mus musculus
MRNFSVVSEFILLGLSDDAQVQALLFVAFLVIYVLTLTGNSMILLVIRVDAHLRSPMYFFLGHLSFLDLLYSSVSTPKMLENLVSETKTIPVKGCLAQAFFVFAIGGTEALLLAVMAYDRYAAICHPLLYGQMMNDWFCQVLVWGSWILAILNSLINTLLAVSLDFCHYGTIHNYNCEFPSLFPLSCSDVSTNATAIVCSFVIHASGTFLLVVGSYGCIFSTILNMSSTRGRSKAFSTCSSHLTVVMLYFGSACLRYVMPTSGSPVEMYFSVQYSVITPMLNPFIYSLKNQEVKAAMRKLLARCYQHF

SEQ ID NO: 2423 - protein, 316 aa, Mus musculus
MELWNSTLESGFILVGILNGSSSPELLCAIVTALYMLALISNGLLLLVITVDARLHVPMYLLLRQLSLIDLLFTSVVTPKAVMDFLLRDNTISFGGCALQMALALMLGSAEDLLLAFMAYDRYVAICHPLNYMVFMSPTVCWLIVSTSWILASLTAVGHTVYTMHFPFCMSQEIRHLLCEILPLLKLSCVDTSQYELMVYVTGVTFLLLPLSAIVTSYTLILSTVLHMPSNEGKKKALVTCLSHLMVVGMFYGAATFMYVLPSSLHSAKQDNIISVFYTIVTPALNPLIYSLRNKEVIGALRRVLGRYILPAHLTL

SEQ ID NO: 2424 - protein, 316 aa, Mus musculus
MENITNISEFILMGFPTAPWLQILLFSIFFITYVFVLLENLVIILTVWVTGSLHKPMYYFLSTMSFLEAWYISVTVPKMLAGFLFRPNTISFLGCMTQLYFFMSLACTECVLLAAMAYDRYVAICWPLRYPVMMTTGFCVQLTISSWVSGFTISMAKVYFISRVAFCGNNVLNHFFCDVSPILKLACMNLSMAETVDFALAIVILIFPLSATVLSYGFIVSTVLQIPSATGQRKAFSTCASHLTVVVIFYTAVIFMYVRPRAIASFNSNKLISAIYAVFTPMLNPIIYCLRNKEVKDAIRKTIAGGRAPALGESIS

SEQ ID NO: 2425 - protein, 313 aa, Mus musculus
MQFENFTTVFTEFVLLGLSGRQDVQQGLFALFFLVYGITVIANLGMILLIKLDSRLHTPMYYFLSNLSFCDICYSTIISPKMLADFLSKEKRIPYNLCAIQLYFFGAFADVECLMLAVMAYDRYVAICNPLLYTIKMSKKLCIQLVAVAYAIGLVDSTIHTSCAFRLSFCNSNVINHFFCDLPPLLALSCSDTSINEIVMFTLIGCVVGCSIVTVLLSYCYIIATICRMNSAEGRHKAFSTCASHLMALAIFYGTLLFMYFRPSSSYSMDTDKMASVFYTVVIPMLNPLIYSLRNKDVKGALKKAININLWPG

SEQ ID NO: 2426 - protein, 323 aa, Mus musculus
MFYLLSVDEEKIKAEKSNASSLIEFILLGFSDVPNLQWILFGIFLIMYLTILMCNSTIVLITRTDPALQTPMYFFLSNFSFVEICYVTVTIPRMLVDLCTQKGNISILACATQMCFILMLGGTECLLLTAMAYDRYVAICNPLHYSLVMNHRICTQLVAACWISVIPVVIGQTYQIFSLPFCGSNRINHFICDIPPVLKLACGDTFVNEIAVYVVAMVFVMVPFMLIIFSYCKIICSILKLSSAKGRTKAFSTCSSHLIVVVLFYGTASITYLQPKPNQSEITGKLLSLFYTILIPTLNPIIYTLRNKDIMAALRKLVSKILV

SEQ ID NO: 2427 - protein, 311 aa, Mus musculus
MTFEIITVFTDFVLLGLSGRQDVQQGLFALFFLVYGITVIANLGMILLIKLDSRLHTPMYYFLSNLSFCDICYSTIISPKMLADFLLKEKRIPCNLCALQMYFLGVFGDTECLILAVMAYDCYVAICNPLLYTTTMSTKLYIQLVAVAYAVGLVDSAVHTSCTFQLSFCNSNVINHFSCDLPPLLALSCSDTSINEILLFIFSTLVIGCSIFHILLSYCYIIVTICRMNSAEGRRKAFSTCASHLMAVAIFHGTLFMYFQPSSLYSMDTDKMASVFYTVVIPMLNPLIYSLRNKDVKGALKKVININLWPG

SEQ ID NO: 2428 - protein, 314 aa, Mus musculus
MKHTDIREEDNASTVTQFLLLGFSDLPNLQSFLFGVFSIMYLIMLIANSFIIVITKLDPTLQKPMYFFLVNFSFLEICYVSVILPRVLYSIWTQDRNISLLACATQMCFFLMLAATESIFLAVMSYDRYVAICSPLHYPLVMSPRKCRQLAAGSWLGGMPFQVGQTCQIFSLHFCNSNQIEHFFCDIPPVLKLACGDTSVIEMYVYVVAILLAAIPFILILTSYSKIIATILRLPTAEGRSKAFFTCSSHLVVVVLFFAPASITYLMPKSSHSAVSDKFLSLFYTIITPVFNPMIYSLRNKEVIAALRRLLLTT

SEQ ID NO: 2429 - protein, 310 aa, Mus musculus
MNNKTVFSQFLLLGLPIPPEHQHLFYALFLAMYLTTVLGNLIIINLIILDSHLHTPMYLFLSNLSFSDLCFSSVTMPKLLQNMQSQDTSITYVGCLTQMYFLLVFGDLESFLLLVMAYDRYVAICFPLHYTSIMSLKLCVYLVLMSWVFNLLYSMLHSLLLARLSFCEDNVIRHFFCDIPALLKLTCSDIHINELMILVLGGLTMVIPFLLIVVSYVQIVSSILNISSARVIQKIFSTCGSHLSVVSLFYGTIFGLYLCPSANNSTVKEIVMAMMCTVVTPMLNPFIYRLRNRNMKEALIRVLFKKKISL

SEQ ID NO: 2430 - protein, 313 aa, Mus musculus
MANSNHSAVSEFILVGLTDDSELQVSLFGVFLVIYLTSVVGNVGLIVLIQVSPQLHTPMYFFLTHLAFIDFCFTSSVTPNTLVNFLREVKSITFYACATQLCCFVTFVVCELYLLSIMAYDRYVAIWNPLLYAVRMPRELCLQVIASTYIYGFTVGLAQAVATFRLSFCGSNVINHFYCDDVPLVALACSDTHVKELMLLIIAGFNTLCSLVIVVISYICILFAILRIHSAEGRRKAFSTCASHLTSITIFYGTVSFMYLQPKSSHSLNTDKFASVFYVVVIPMLNPLIYSLRNQEVKSALKRIVEKLSSAIK

SEQ ID NO: 2431 - protein, 311 aa, Mus musculus
MPGNNQTIISQFLLLGLPIAPEYEHLFYALFLAMYLTTVLGNLIIIILIILDSHLHTPMYLFLSNLSFSDLCFSSVTMPKLLQNMQSQDTSIPYAGCLTQVYFFLFFAALENFLLVAMAYDRYVAICFPLHYASIMSPKLCVSLVLLIWVLTTLYAMLHTLLLTRLSFCENNVIPHFFCDLSALLKLACSDIHINELVILIIGGLVVLLPFLLIIVSYARIISSILKVPSTRGIHKLFSTCGSHLSVVSLFYGTIIGIYLGPSANNSTLKDIVMSMMYTVVTPMLNPFIYSLRNRDIKGALKKVFQKKSLL

SEQ ID NO: 2432 - protein, 312 aa, Mus musculus
MPGKNQTVISRFILLGLPIPPEHQHLFYALFLAMYLTTVLGNLVIIVLIHLDSHLHTPMYLFLSNLSFTDLCFSTVTMPNFLQNMQSQVSSIPYAGCLAQMYFFLFFGDVESLLLVAMAYDRYVAICFPLHYTRIMSPNLCVSMVLLSWALTTLYAMLHTLLLTRLSFCKNNVIPHFFCDLSALLKLACSDIHINELMIMIIGALVVILPFLLIIVSYAHIVSSILKVPSTRGIHKVFSTCGSHLSVVSLFYGSVIVLYLCPSSNNSTVKDTVMSMMYTVVTPMLNPFIYSLRNRDMKEALKRVLQKKIKLS

SEQ ID NO: 2433 - protein, 315 aa, Mus musculus
MERGNQTVVSEFLLLGLPIEPHQQDLFYALFLSMYLTTALGNLIIIILIHLDSHLHTPMYLFLSNLSFSDFCFSSVTIPKLLQNMQSQVPSIPYAGCLAQMYFFLLFADLESFLLVAMAYDRYVAICFPLHYTSIMSPKLCLCLVALSWLLTTVISLSHTLLMARLSFCANNVIPHFFCDMSALLKLACSDIQINKLMIFILGGLVIIVPFLLIFSSYARIVSSILKVPSSRSIRKAFSTCGSHLSVVSLFYGTIIGLYLCPSANNSTIKETVMAVMYTVVTPMLNPFIYSFRNQDIKGAFKKVFSKQMANFSLR

SEQ ID NO: 2434 - protein, 319 aa, Mus musculus
MLTGKLVLNQSGTPEFVFRVFTNAPEFQALLFTLFLLLYLMIFCGNTAIIWVVCTHTSLHTPMYFFLSSLSFLEICYTTDVVPLMLSNIFGTQKPISLAGCGTQMFFFLTLGGTDCFLLAIMAYDRYVAICHPLHYNLIMTKKLCVQMVMGSLSLALFLSLQLTALIFTLPFCGHYLEINHFLCDVPPVLRLACADIHVHQAVLYVVGILVLTVPFLLIFISYVFIVSTILRMRSAEGRQRAFSTCSSHLTVVLLQYGGCSLVYLRPRSSSSDDEDRQIALVYTFVTPLLNPLIYTLRNKDVKGALRNSIFCKSASHCS

SEQ ID NO: 2435 - protein, 319 aa, Mus musculus
MVDRNPFFNKSGPPEFVFRVLTNVPEFQAILFTLFFLLYLMILCGNTTIIWVVCNHSSLHTPMYFFLGSLSFVEICYITDVVPLILSNIFGDQKPISLAGCGTQMFFFSVFGCTDCFLLTVMAYDRYVAICHPLHYNLIMTQKLCVQMVIGSLSLALLLSLELTAFTFTLPFCRHRLEINHFLCDVAPIMRLACADIHVNQAVLYVVSILVLTVPFLLIFISYVFIASTILRMHSAEGRQRAFSTCSSHLTVVLLQYGCCSLVYLRPRSSTSEDEDRQIALVYIFGTPLLNPLIYTLRNKDIKDALRNSFFHVPASDTS

SEQ ID NO: 2436 - protein, 309 aa, Mus musculus
MADIHNVTEFLFLGLSSNKEVEIVCFVIFLLLYMAIVLGNLLMVVTVVASRSLGSPMYFFLGYLSFVEICYSSTTAPKLILDLLAEKKSISVWGCMTQLFFMHFFGGAEIFLLTVMAYDRYVAICKPLHYTSIMNRNVCAVLVGTAWIGGFVHSFAQILLIFPLPFCGPNIIDHYFCDLLPLLKLACSDTFLIGLLIVANAGTLSVISFVVLLASYVVILFHLRTQSAEGRRKALSTCGSHVTVVILFFGPCVFIYLRPSDTLPVDKMIAVFYTVITPLLNPLIYSLRNAKVKKTMKSLWFRTMKVDEK

SEQ ID NO: 2437 - protein, 309 aa, Mus musculus
MADIHNVTEFIFLGLSSNQEVQKVCFVIFLLLYMAIVLGNLLMVVTVVASRSLGSPMYFFLGYLSFVEICYSSTTAPKLILDLLAEKKSISVWGCMTQLFFMHFFGGTEIFLLTMMAYDRYVAICKPLHYTSIMNQSVCAVLMGTAWIGGFVHSFAQILLIFPLPFCGPNIIDHYFCDLLPVLKLACSDTFLIGLLIVVNGGTLSVISFVVLLASYGVILFHLRTQSAEGRRKALSTCGSHVTVVILFFGPCVFIYLRPSDTLPVDKMIAVFYTVITPLLNPLIYSLRNAEVKKAMKSLWFRTMKVDEK

SEQ ID NO: 2438 - protein, 309 aa, Mus musculus
MENKRNVTEFILIGLTQNPQMQKVVFVTFLVLYMTTISGNLLIVVTIINSQALNSPMYFFLSHLSLIDTIYTSSSAPKLIADSLQENKVISFNGCMAQVYAEHIFGATEIILLTVMAYDRYVAICKPLHYMTIMSHKLCILLVGVAWTGGFLHATIQILFTVWLPFCGPNIIDHFMCDLYPLLELVCMDTHILGLFVAANSGFICLFNFLLLMGSYVIILRSLKNYSLEGRRKALSTCVSHITVVVLFFIPCIFVYLRPVTTLPLDKGVAVFYTMVAPMLNPLIYTLRNAEVKNAIKKLWRKKVTSDSN

SEQ ID NO: 2439 - protein, 305 aa, Mus musculus
MMNGTLVTEFLILGFSEMPHLRVPLLFSFLCLYMAAISGNLLIMVTISASPALHTPMYFFLVNLAIVDILCTSTILPKLLDSMMTGRTISYGGCMAQLFFFTWSLGAELLLFSAMAYDRFVAICCPLHYSAWMGPRVCAFLAGIVWTISLTNTSVHTGLMLRLPFCSSNVIEHFFCEIPPLLKLSCAPTQLNEAMAFAADVFLAVGNFSVTILSYGFIVASILKIRSAEGKRRAFSTCSAHLIVVTMYYSTVIYTYIRPSSSYSLNKDKVVSIIYTSVAPTLNPLIYTLRNKDVKVALRRLLSCC

SEQ ID NO: 2440 - protein, 314 aa, Mus musculus
MEEENQTGVVYFHFRPFSTNSTVASLVFVGFLLLYLGSLIGNLTIGLTVWQDHSLHTPMYFFLFVLATLELGYSTNIAPLTLASILSMGKMLISLPSCGAQMFFFILLGGSDCVLLAIMAYDRYVAICHPLHYSLIMSWQLCGQMALGSLGLGFLLSLPLTILICHLPFCGHNEIYHFFCDMPAVMRLACTDTHIHQAALFAISVAAVAIPFLLICLSYGCIVATILRMTSAEGKRRAFSTCSSHLLVVVLQYGCCTLIYLRPSSSYSPEEGRAVSVVYTFFSPLLNPLIYSLRNQEVTDAVKRLLTRMFWFRK

SEQ ID NO: 2441 - protein, 312 aa, Mus musculus
MEPGNYTVVTEFILLGLTDDITVSVILFVMFLIVYSVTLMGNLNIIVLIRTSPQLHTPMYLFLSHLAFLDIGYSSSVTPIMLRGFLRKGTFIPVAGCVAQLCIVVAFGTSESFLLASMAYDRYVAICSPLLYSTQMSSTVCILLVGTSYLGGWVNAWIFTGCSLNLSFCGPNKINHFFCDYSPLLKLSCSHDFSFEVIPAISSGSIIVVTVFIIALSYVYILVSILKMRSTEGRQKAFSTCTSHLTAVTLFFGTITFIYVMPQSSYSTDQNKVVSVFYTVVIPMLNPLIYSFRNKEVKEAMKKLIAKTHWWS

SEQ ID NO: 2442 - protein, 310 aa, Mus musculus
MEKSSNITVFILLGLSQNKNTEILCFVLFFLFCYIAIWMGNVLIMVSITCTHLVEQPMYFFLNYLSLSDLCYTSTVTPKLMTDLLAERKVISYNNCMIQLFTTHLFGGIEIFILTGMAYDRYVAICRPLHYTIIMSRHRCNLIIMTCCTGGFVHSASQLLLTVFLPFCGPNEIDHYFCDVYPLLKLACSNTHIIGLLVIANSGLIALVTFVVLMTSYFFILYTIRAYSAESRSKALSTCSSHLTVVVLFFAPALFIYIRPATTFPEDKVFALFYTIIAPMFNPLIYTLRNTEMKNALRKVWGHQGLLKGR

SEQ ID NO: 2443 - protein, 322 aa, Mus musculus
HTNSTKITEFILLGLTDRPELQPLLFVLFLFIYLVTVLGNMGLMALIRLDSRLHKPMYFFLSNLAFVDLCYTSTATPQMLTNFLSEKKTISFIGCFIQCYLFIALLLTEFYMLAAMAYDRYVAICNPLRYSVKMSRRVCICLAMCPYIYGFSDGLFQAILTFSMTFCKSNVINHFYCADPPLIKLSCSDTYKKEHAMLISASFNLSSSLTIILVSYAFIIAAILRIKSAEGRHKAFSTCGSHMMAVTLFYGTLFCMYVRPPTDKTVEESKIIAVFYTFVSPLLNPLIYSLRNKDVKQALKTILRQNVIRTALMRPPSNKLQQ

SEQ ID NO: 2444 - protein, 312 aa, Mus musculus
MEAENHTAIVHFLLIGLSEDPKIQSVLFGLFLSMFLITMLGNFLIVLVTSCDSHLHTPMYFFLCNLSFVDICLTSTTIPKMLVNIYMHTMKISYTECLTQVYFFNNFLGMDNFLLTIMAYDRFVAICHPLNYTVIMNPRICGLLVLLSWIIMFWVSLIHMLLMKQLNFSTSTEIPHFFCELTELLRVARSDTHINNIFLYLVTAVLGMFPVIGIAFSYFHIVSALMKMSSIKNKYKAFSTCGSHLCVVSMFYGTGFVVHLSSAVAHSSKRNTITSIMYTVVTPMLNPFIYSLRNKDVKGALVRLLRRVKFCP

SEQ ID NO: 2445 - protein, 305 aa, Mus musculus
MEEGNQTVVSEFIFQGLCASKELQLFLLLPFSILYLMAVVGNLFVVILIIIDHHLHSPMYFLLANLSFIDFCLSSVTTPKLITDLLKDNKTISFGGCMSQILCVYFFGGSEMVLLVTMAYDRYVAICRPLHYSSIMGRQKCIWLVVISWTIGFIHAMSQLILILDLPFCGPRVIDSFFCDISLVMKLACMNTDTLEILINADSGVLATTCFILLLISYTNILLTVQLHSKDGSSKALSTCTSHIIVVLLFFGPVIFIYLCPVSITWVDNFLAVFYSVITPLLNPAIYTLRNKDIKNAIKKLINHL

SEQ ID NO: 2446 - protein, 277 aa, Mus musculus
LPFSILYLMAVVGNLFVVILIIIDHHLHSPMYFLLANLSFIDFCLSSVTTPKLTIDLLKENKTISFVGYMRQIVCVHFFAGGEMVLLVTMAYDRYVAICRPLHYSSIMDRQKCIWLVVISWIVGFVHAISQMLLILDLPFCGPRVIDSFFCDIPLVMKLACMNTDTLEILINADSGILATTCFILLLISYTYILLTVQHRSKDGSSKALSTCTSHIIVVLLFFGPIIFIYLWPVSITWVDKFLAVFYSVITPLLNPAIYTLRNKDIKNAIKKLISHK

SEQ ID NO: 2447 - protein, 293 aa, Mus musculus
  VARIANT (13)...(19): Any amino acid
SWHKKVKCLTHHXXXXXXXLLLPFSVLYLMTLVDNLFVVILIITDHHFNSPMYFLSANLSFVDFYLSSVNTPKLTIDLLKENKTISFGGCMSQILCVHFFGGSEMVLLVTMAYDQYVAICRPLHCSGSMDRQKCIWLVVISWIVGFVHAISQLLLILDLPFCGPRVIDSFFCNIPLVMKLACMNTDTLGILINADSGILATYSFTLLLISYTYILLTVQHRSKDGSLKALSTCTSHIIVVLLFFGPIIFIYLWPVNITWVDKFLAVFYTVITPLLNPAIYTLRNKDIKNAIKN

SEQ ID NO: 2448 - protein, 313 aa, Mus musculus
LHGETEPSPVVKDFILIGITNRPELKGPLFGLFLIIYLISLMGNMGMIILTIVDPRLQTPMYFFLKHLAVTDLGYSTAVGPKMLENFVVNQNTISYYLCALQLACFLLFITCELFILSAMSYDRYVAICNPLLYNVIMSKKKCWLLIVIAYLYGLFLSLIITLKMFRLSFCSYNIINHFFCDCIPLIPLLCSNTHEIQLIILVFAIFDSICSLLVVLVSYLLILITILRMNSTEGRHKAFANCGSHITVVTVFYGTLISMYLQPNYSHSFDTDKLASIFYTMIIPMLNPLIYSLRNKDVKNAGQRIWKKLCKI

SEQ ID NO: 2449 - protein, 316 aa, Mus musculus
MDLKNKTTSSFILLGLFPSCRYPNLLISFILLIYTLASAGNSLLILLIWLDPRLHTPMYFLLSQLSVIDLAYISCTVPKAAINYFTGRRNISFFACATQMFSFLTLGLAECILLTLMAYDRYVAVCNPLRYTILMSPKVCLMMAASTWIGAVTAALVHTVYPMNFPICGSREINHYFCEMPAILRMSCVDTSVYEMVKFVSTIIFLLTPFTLILTSYTLIFLTVLRMNSPKGRNKALATCSSHLTVVSLYFGQAIFIYMTPTSSHTPDQDQVGAVLGTIVTPMLNPLIYSLRNKEVIGALQKCTGRCCSRDRVGSL

SEQ ID NO: 2450 - protein, 315 aa, Mus musculus
MGATNDSTFSHFILTGFSDRPELERVLFAILLPAYLLTLLGNSTIILVSRLDPHLHTPMYFFLTHLSFLDLSFTSSSIPQLLYNLSGPDKTISYVGCALQLVLFLGLGGVECLLLAVMAYDRFVAICKPLHYMVIMSPRLCVGLVSVAWSCGVANSLAMSPATLSLPRCGHHRVDHFLCEMPALIRMACVNTAVVEGIAFILAIGIVLSPLVFILVSYGYIVRAVLRISSAAGRQKAFNTCGSHLTVVSLFYGNIIYMYMQPGNSSSQDQGKFLTLFYNIVTPLLNPLIYTLRNKEVKGALRRLLLGSRETGKVR

SEQ ID NO: 2451 - protein, 313 aa, Mus musculus
MEGANLSGVSEFLLLGLSQDPRQQQLLFSAFLSMYLLTGLGNLLIILAIAADPRLHTPMYFFLANLAFVDVCFTSTTIPKMLANHVSGHKGISYSGCLTQMFFFIWFAGIDSFLLTAMAYDRFVAICHPLHYTTSITPRLCGFLVTASWASAFANALTHTVLLTRLLFCGHNQVPHFFCDLSPLLKLACLDTSLNDIMVYTVGALPIITPFVGILTSYTRIFTAVLRIPSTGGKWKAFSTCGSHLSVVSLFYGTLIGVYFSPTSSHTAQKDTAAAVMYTVVTPMMNPFIYTLRNKDMKGALMTFVRRTAVLVR

SEQ ID NO: 2452 - protein, 326 aa, Mus musculus
MFSDDPVQQLSMAMWLNQSSTDDFILLGIFSYSPRDLLLFSVVMLVFTAALFGNALLILLICTDPRLHTPMYFFLSQLSLMDIMLVCTNVPKMAVNFLSGKKSISFVGCGIQIGLFVCLVGSEGLLLGLMAYDRYVAISHPLRYPVLMNQKVCLQIIGSSWAFGIADGLVQMVVVMTFPYCSLREVDHFFCEMLSLLKLACVDTSLFEKIVFFCCIFMLLFPFSIIVASYTRILGTVLHMHSAKSQKKALATCSSHMAAVSFFYGAAMFIYLRPRQYRTPSQDKMVSIFYTVLTPMLNPLIYSLRNRDVIGALQKGLDRCRVGSQP

SEQ ID NO: 2453 - protein, 312 aa, Mus musculus
MLMAMENDSSVTEFVFMGLTEQPELQLPLFFVFLLNYTATVMGNLSLVVLICLNSHLHNPMYFFLFNLSLVDFCYSFVCTPKMLMGFVSEKSIISYTGCMTQLFFFCFFVNSECYVLTAMVYDRYVAICKPLVYAILMSPRMCSLLMIGSYLMGFASAMAHTGCMIRLKFCDLNIINHYMCEIFPLLQLSCSSTYANELVSSLIACIVVIVSGLVILMSYASILLNVVQMSSATGWSKAMGTCGSHIITVSLFYGSGLLTYVKPASAESVDQGKFFSVFYTLMVPMLNPLIYSLRNKDVKLAAKRTMKRITI

SEQ ID NO: 2454 - protein, 309 aa, Mus musculus
MELKNDTQISKFILLGISEDPLWQPFLFGLFLFMYLVTLLGNLLIIIATITDSHLHTPMYFFLSNLSFADICFTSASIPKMLVNIQTKNKVITYEGCISQVFFFILFGVLDNFLLAVMAYDRYVAICHPLHYMVIMNCRLCGFLVLGSWVTTALNSLLQSSMALRLSFCTDLKIPHFVCELNQLVLLACNDTFPNDMVMYFAAILLGGGPLAGILYSYSKIVSSIRAISSSQGKYKAFSTCASHLSVVSLFYSTLLGVYLSSSFTQNSHSTARASVMYSVVTPMLNPFIYSLRNKDLMGALRRLLRRKS

SEQ ID NO: 2455 - protein, 315 aa, Mus musculus
MWVVLGQNQSWVSEFILIGFSSDPTTNSILFIVFLLIYLSSVLGNGLIIMLVCLDTQLHTPMYFFLSTLSLLDMSYVTTTMPQMLVHLLAHSQTISFVGCWLQMFVFSALGITECTFFVVMAYDRYVAICYPLRYTVILNWGLCIHLTAGSWVCGLFSSLLHTFFTMSLPYCGPNRVNHYFCEGPSVRSLACMDTHVIEMVDFVLSVFVIVIPISLIVASYIGIAKAILKIKSTEGRCKAFSTCASHLTVVTFFYAPATYIYMRPNSSYSPERDKQISLFYNTFTALLNPVVYSLRNKDIKRAFFKVMGHGRMDY

SEQ ID NO: 2456 - protein, 312 aa, Mus musculus
ETRNQTIISDFLLTGFSDHPEQQPLLFTLFLGMYLVTLLGNLFIILAIVSDQHLHTPMYFFLANLSFIDNCLTCTIVPKVLTNIQTQHQTISHTGCLLQMYFFMTMAMLDDFLLAVMAYDRYVAICLPLHYTTIMCPQRCLLLVATSWLCSNLLALSLILQMAQVSFCASHSIPHFFCDLLPLLKLACSDTHTFQLIMFAEAALSGVVPLTCVLVSYAHIMNTILKIPSSGGKHKVFSTCGSHLTVVTLFYGTVFLVYFQPSSSYSENTGIVASVVYTMVTPMINPFIYSLRNKDMKGALWKLFGLGKHCNL

SEQ ID NO: 2457 - protein, 310 aa, Mus musculus
MNNSTLVTEFLLEVFAESCELRILLSVLFLLVYLGSLFGNLIIIIVTTVDQTLNTPMYFFLRNLSIVDMCYVSVTVPNACFNSLTGQRNISVTGCAAQIFFVFFCACVEMFFLTIMAQDRYVAICKPLLYPVIMNHQFCVQMTLASLHSSLIIASVHTFKTFQLSFCHSNVVPQFFCDIPSLLKLSCSDTFNNKLLMLISAIIIGCSCFTFIAVSYFRILSTVLKVPVKGERGKAFSTCVPHIVVVSVFLSSSTYVYLRPPVPTLEVVKEMALSVSYTIVPPFLNPIIYSLRNRQIKEAVKKVILRISLV

SEQ ID NO: 2458 - protein, 313 aa, Mus musculus
FFRNTEYKNQTFASEFILLGLTDDPELQLILFGIFLFMYLVTVLGNLIIICAVSLHPKLHTPMYFFLSNLSFTDICFITSTVPKMLVNIQKQNNAISYPDCLTQMYFVIFLGGMENFLLAAMAYDRYVAICHPLRYTVIMNPSICILLTLLSVLSSTIDALLHSLLVLRLSFCTYLKIPHFFCELAHIIKLSCSDTLINNIVVYLATFIFGGLPFWGIILSYVQIVYSVLKKPSVRGSYKALSTCGSHLSVVSLFYGSVIGVYISFAVTDSSRKAAVASVLYTVVPQMLNPFVYSLRNKDMKEAVRKLCGGIL

SEQ ID NO: 2459 - protein, 309 aa, Mus musculus
MADIHNVTEFFFLGLSSNQEVQRVCFVIFLFLYMAIVLGNLLMVVIVAVSRNLGSPMYFFLSSLSFVEICYSSTTAPKLIVDLLAEKKSISVWGCMAQLFFMHFFGGIEMFLLTMMAYDRYVAICKPLHYTSIMNRQVCTVLVGMAWMGGFVHSLAQVLLIFRLPFCGPNIIDHYFCDVLPVLKLVCSDTFLIGLLIVVNGGTLSVISFVVLLSSYAVILFHLRTQSAEGRRKALSTCGSHVTVVVIFFAPCVFIYLRPTATLPIDKMVTVFYTVITPLLNPIIYSLRNAEVKKAIKILWTRATKVDKK

SEQ ID NO: 2460 - protein, 298 aa, Mus musculus
LGFSSVPTTNSILFIVFLLVYLSSVLGNGLIIMLVCLDTQLHTPMYFFLCTLSLLDMSYVTTTMPQMLVHLLAHSQTISFVGCWLQMYMFSALGIAESILFVVMAYDRYVAICYPLRYTVILNWGLCIRLAAGTWIYGSFSSLLHTFFTMSLPYCGPNRVDHYFCEGPSVRSLACMDTHLIEMVDLVLSVFVVVTPISLIVASYIHITKAILKIKSTQARCKSFSTCASHLTVVTFFYIPAIYIYIRPNSSYSPERDKQISLFYNVFTALLNPVVYSLRNKDIKRAFLKVMGLGRMDW

SEQ ID NO: 2461 - protein, 312 aa, Mus musculus
VRRENQSTVFEFLLLGLPIRPEHQNVFFTMFLAMYLTTVLGNLLIILLIRLDPHLHTPMYFFLSHLAFSDISLSSITVPKMLMNIQAQHHSISYKGCISQMYFFILFVCLDNFLLAAMAYDRYVAICHPLHYITVMREELCVCLVAGSWFFSCVHALLHTLLLIQLSFCASNTVPNFFCDLTALLKLSCSDISLNKLVIFTEGGLLFILPLSSIMGSYILIGRTALKAPSTKRFIKTFSTCGSHLLVVSLYYGTLAGEYFFSSFQNSSDKDIVASVIYTVVTPLLNPFIYSLRNSDIKQALEIVVTKINCFK

SEQ ID NO: 2462 - protein, 317 aa, Mus musculus
MSGWSNGTYNESYTSFLLMGFPGMQEARALLVLPFLSLYLVILFTNALVIHTVASQRSLHQPMYLLIALLLAVNICAATTVVPPMLFSFSTRFNRISLPRCLGQMFCIYFLIVFDCNILLVMALDRYVAICYPLRYPEIVTGQLLAGLVVLAVTRSTSIVAPVVVLASRVRFCRSDVIRHFACEHMALMKLSCGDISLNKTVGLTVRIFNRVLDMLLLGASYSRIIHAAFRISSGGARSKALNTCGSHLLVIFTVYSSTMSSSIVYRVARTASQDVHNLLSAFYLLLPCLVNPIIYGARTKEIRQHLVALFQRTQQQ

SEQ ID NO: 2463 - protein, 309 aa, Mus musculus
VLLNQTLVTEFLLLGVTDIQELNPILFVTVLAMYFVNVAGNGAILLIVISDPRLHSPMYFFLGNLACLDICFSTVTVPKILDNFFSTSKAISFLGCITQLYFFHLLGSTEALLLAVMAFDRFVAICRPLHYPSIMNRQVCIQVAISIWAIPFVHALVHSILTSQLNFCGSNQIHHFFCDVKPLLELACGNTELNRWLLNTFTGTFAIGLFFLTFLSYFYIITYLFLKTRSCSMLHKALSTCASHFMVVMIFYAPVLFIYINPDSGSSLEKDRIIAVMYTVVTPALNPLIYTLRNKEVRGALNRKLRILL

SEQ ID NO: 2464 - protein, 312 aa, Mus musculus
MILVNKSHPEEFILLGFADRPWLELPLFIILLVTYPTAMIGNIAIILMSILDPCLHSPMYFFLTNLSFLDMCYTTSIVPQMLINLWGSTKTISYLRCVVQLYFFHTMGGTECVLLALMSFDRYVAICKPLHYTLIMNRRNCLLLVSTVWLTGISYAVSEATVTLQLPLCGHNKMDHLVCEIPILIKTACGEKETNELALSVICIFLLAVPLCLILASYASIGHAVFKIKSIEGRKKAFGTCSSHLIVVLLFYGPGISMYLQPPSSITKDQPKFMALFYGVVTPTLNPFIYTLRNKDVKGALGNLFRNIFIPK

SEQ ID NO: 2465 - protein, 314 aa, Mus musculus
MEDMPAGNHCTVTVFFLAGLSEQSELQLPLFLFFTGIYLITVSGNLGMIILIGLSSNLHTPMYYFLSSLSFIDFGQSTVVTPKMLVSFLTEKNLITYPECLAQLYFAIIFGTAESYTLAAMAYDRYVAICNPLVYNIAMSSQIYCSLISGVYIFAVFCASVNMGFMFRIQFCKSDVINHYFCDFLPLLKLACSNTYVSEMLILFFGTLNIFVPMLTIITSYISIISSILRISSSEGRSKAFSTCSSHISAVAVFYGSTAFVYLQPSRVSSIDQGKVSSVFYTTVVPMLNPLIYSLRNKDVSVAMKKILERKRFM

SEQ ID NO: 2466 - protein, 312 aa, Mus musculus
MEDMAAGNQCTVAEFFLAGLSEKPELQLPLFLLFTGIYTVAGNLGMITLIGLSSHLHTPMYYFLSSLSFIDFCQSTVITPKMLVSFLTEKNIIFYSGCMAQLYFFIIFGVAECYTLAAMAYDRYVAICNPLLYSVSMSYQIYSSLISGVYIFAVVCSSVITGFMLRIQFCKLDVINHYFCDLLPLLKLARSNTYINEMLTLFVSMFNICVPVMTIITSYIFIIATILNIHSREGKFKAFSTCSSHISAVAIFYGSGAFMYLQPSSVSSMDQGKVSSVFYTTVVPMLNPLIYSLRNKDVSVALKKILERKKVM

SEQ ID NO: 2467 - protein, 312 aa, Mus musculus
MEIKNCSVVTEFILLGIPHTEGFETLLFVLFLPFYACTLVGNVSILVAVISSTRLHTPMYFFLGNLSVFDMGFSSVTCPKMLFYLMGLSRLISYQDCVSQLFFFHFLGSIECFLYTVMAYDRFAAICHPLRYSVIMNSKICVALAVGTWLLGCFHSSVLTSLTFTLPYCGPNEVDHFFCDIPAILPLASADTSLAQRVSFTNVGLVSLVCFLLILLSYTRITISILSIQSTEGRQRAFSTCSAHLIAILCAYGPIITIYLQPTPNPMLGTVVQILMNLVGPMLNPLIYTLRNKEVKIALKKILHGKGSVSEG

SEQ ID NO: 2468 - protein, 314 aa, Mus musculus
MRTLYSNTSSTLSFMLTGFPEMQSLEHWLAALLLLLYVISIVGNALILFIIKEEQSLHHPMYYFLSLLSVNDLGVSFSTLPTVLASMCFHIPETAFDACLAQMFFIHFFSWTESGILLAMSFDRYVAICNPLHYSSVLTDARVAHMGMSIIIRSFCMVFPLPFLLKRLPFCKANVLTHSYCLHPDLIRLPCGDTTINSMYGLFIVISAFGVDSVLILLSYVLILRSVLAIASREERLKTLNTCVSHISAVLIFYVPMISVSMVHRFVKHAPEYVHKFTSLVYLFVPPMLNPIIYSIKTKEIRRRLHKMLLGTKF

SEQ ID NO: 2469 - protein, 322 aa, Mus musculus
LIISLLNASSLTPASFILNGIPGLEEVHLWISFPLFTMYSIALTGKFGLIYLIYSEEVLHRPMYIFLALLSFTDVLMCTSTLPNTLCILWFNVKKIDFKACLAQMFFVHTFTGMESGVLMLMALDRYVAICYPLRYATILTNVVIAKAGMLTFLRGVILVIPFIFLTKRLPYCKGNVIPHTYCDHMSVAKISCGNVQINAIYGLMVALLIGGFDILCITVSYTMILRAVVSLSSADARQKAFSTCTAHICAIVITYVPAFFTFFTHRFGRHTIPPHIHIIMANLYLLMPPTMNPIVYGVKTKQIESVIRFLFKGRENSSHKI

SEQ ID NO: 2470 - protein, 317 aa, Mus musculus
MEGKNQTAPSEFIILGFDHLNELQYLLFTIFFLTYICTLGGNVFIIVVTIADSHLHTPMYYFLGNLALIDICYTTTNVPQMMVHLLSEKKIISYGGCVTQLFAFIFFVGSECLLLAAMAYDRYIAICKPLRYSFIMNKALCSWLAASCWTGGFLNSVLHTVLTFHLPFCGNNQINYFFCDIPPLLILSCGDTSLNELALLSIGILIGWTPFLCIILSYLYIISTILRIRSSEGRHKAFSTCASHLLIVILYYGSAIFTYVRPISSYSLEKDRLISVLYSVVTPMLNPVIYTLRNKDIKEAMKAIGRKWKPPVFSSDI

SEQ ID NO: 2471 - protein, 330 aa, Mus musculus
MTYCSVFQEMSVNCSLWQENSLSVKRFAFAKFSEVPGECFLLFTLILLMFLVSLTGNALITLAICTSPALHTPMYFFLANLSLLEIGYTCTVIPKMLQSLVSEARGISREGCATQMFFFTLFGITECCLLAAMAFDRCMAICSPLHYTTRMNRGVCAHLAIVSWGTGCIVGLGQTNFIFSLNFCGPCEIDHFFCDLPPVLALACGDTSQNEAAIFVVAILCISSPFLLIIYSYVRILVAVLVMPSPEGRHKAFSTCSSHLLVVTLFFGSGSINYLRPKSSHSPGMDKLLALFYTAVTSMLNPIIYSLRNKEVKAALRRTLGLKKVLTMNR

SEQ ID NO: 2472 - protein, 314 aa, Mus musculus
MEDMTSGNNCTVTEFFLAGLSEEPELQLPLFLLFTGIYLITVAGNLGMITLIGISSHLHTPMYYFLSSLSLIDFCQSTVVIPKMLMSFLVEKNLISYPGCMAQLYFFITFGIAECYTLAAMAYDRYVAICNPLLYNATMSSQIYTSLILGVYIFAVICASVNTGFMSRIKFCKSDVISHYFCDFLPLLKLACSDIYINEMLILSFGTVNICVPLLTVITSYIFIIASILRIRSSEGRSKAFSTCSSHISAVAVFYGSAAFTYLQPSSVSLIDQGKVSSVFYTTVVPMLNPLIYSLRNKDVTVALKTILERKKFM

SEQ ID NO: 2473 - protein, 317 aa, Mus musculus
MSTFHNVCSVPSSLWLTGIPGLETLHIWLSIPFGSMYLVAVVGNITILAVVRVERSLHQPMYFFLCMLAVIDLVLSTSTMPKLLAIFWFGAGHIGLDACLCQMFLIHCFATVESGIFLAMAFDRYVAICNPLRHSMVLTHTLVGRLGLAAVLRGVLYIGPLPLMIRLRLPLYKTRVISHSYCEHMAVVALTCGDSRVNNVYGLSIGFLVLILDSAAIAASYVMIFRAVMGLATPEARLKALGTCGSHICAILIFYVPIAVSSLIHRFGHQVPPPIHTLLANFYLLIPPILNPIVYAVRTKQIRDRLLQILKTGTKIR

SEQ ID NO: 2474 - protein, 309 aa, Mus musculus
IELNTTPTQLTFFLLTGVPGLEDIQIWMSIPFSFMYVLAVLGNVLVMAVVVYDRSLHEPMYLFLAMLAFNDVLLCTVTVPQMLLIFWQGPLEATFPACLTQMFFVHALFLSESAVLLAMAFDRYVAICIPLHYTSLLTSSIIGKVGLVLIARSVAVVTPGVLLILRLDFCRSNIIHHTYCENMGIAKLACNSFTLNSIYGLSAALLTTGLDFVFISLSYWLILKTVLQLPSKEARTKAFGTCGAHICVILIFYTLAFFSFFTHRFGHHVSRHTLILLANLYLLIPPTMNPIVYGIKTKEIRMRVVGTCS

SEQ ID NO: 2475 - protein, 328 aa, Mus musculus
MLILSVRFLVDKPSEMRNRTSVTYFILLGLTDDPELQVVIFFFLFLTYLLSITGNLTIITLTLLDSHLKTPMYFFLRNFSFLEISFTSVCNPRFLVSILTKDKSISYNACAAQLFFFIFLGSTEFFLLASMSYDRYVAICKPLHYTTIISNKICHQLIISSWLAGFLVVFPPLAMGLDLDFCDSNTIDHFTCDSAPLLQISCTDTSTLELMSFILALITLMTTLMLIILSYTCILRTILKFPSAKQREKAFSTCSSHMIVVSISYGSCIFMYVKTSAKAGVALTKGVAMLNTSVAPMLNPFIYTLRNQQVKQAFKDLVRKKLASKLLI

SEQ ID NO: 2476 - protein, 311 aa, Mus musculus
MQNQSFVTEFVFLGLSQNPNLQKLIFIICLVVYIATMGSNMMIVVTVVCSPTLLGSPMYFFLAFLSLLDASFSSAMTPKMILDSLYKRKTISFEGCMIQLFVEHFLGGAEMILLTAMAYDRYVAICKPLHYSSIMTRKVCGTLVGVAWAGGLLHSTVQIIFTLQLPFCGPNVINHFMCDLFPLLELACTDTHIFGLFVVANSGLICIIVFVLLLVSYGFILLSLRSQSSEGRWKALSTCGSHVAVVVLFFVPCIFIYARPHSAFSFDKMVALFYTMLSPLLNPIIYTFRNKDMKNAIRKLWKKLVMVSDER

SEQ ID NO: 2477 - protein, 305 aa, Mus musculus
  VARIANT (12)...(18): Any amino acid
  VARIANT (20)...(25): Any amino acid
MQNQSFITEFVXXXXXXXPXXXXXXVYIATIGGNMMIVVTVVCTPALLGSPMYFFLAFLSLLDASFSSAMTPKMIVDSLYERKTISFEGCMIQLFAEHFFGGAEVIVLSAMAYDRYVAICKPLHYSSIMTLRLCGTLVGVAWTGGFLHSIIQIIFTLQLPFCGPNIIDHFICDLYPLLELACTDTHIFGLLVVANSGFICIIIFTLLLVSYGFILLSLRSHSSEGRWKALSTCGSHIAVVVLFFVPCIFTYARPPTAFSFDKMVAIFYTMLSPLLNPMIYTFRNKDMKNAIRKMWTRLIVHSDKK

SEQ ID NO: 2478 - protein, 312 aa, Mus musculus
MGRENQTSTFEFLLWGLSEQLQQQHILFLIFLWMYLVTVVGNLLIVLAISTDVRLHTPMYFLLANLSCDDILFTSTTIPKALVNIHTQSRTISYAGCLVQLYFFLTFGDMDIFLLATMAYDRFVAICHPLHYRMIMSFQRCSLLVTACWILTTFVAMTHTLLIFRLSFCSKKVIPDFFCDLGPLMKIACSETRINELVLLFLGGAVILIPFLLILVSYIRIVSAILRLPSAQGRRKAFSTCGSHLSVVALCFGTVIKAYLCPSSSSSNSVVEDTAAVVMYTVVTPLLNPFIYSLNKDMKGALVRILKGKVSF

SEQ ID NO: 2479 - protein, 308 aa, Mus musculus
MEKNATLLTEFVLTGLSHQPLWNIPLFLVFLVIYLITIVGNVSLITLIWTDPHLHIPMYLFLGSLAFVDTSISSIVVPKMLLNFFGKSKVITLSECMAQFFLFNISATTECFLLAAMAYDRYVAICKPLLYPVVMTNGLCVWLIALSFVAGIIHALIHEGFLLRLTFCNSNMIHNFYCDIISLLKISCTDTSLNYLIVFIFSGSIQVFTISTILVSYTIILFTILKKKSAKGIKKAFSTCGAHLLSVSLYYGPLLFMYVHPASSEVDDQDMIDSLFYTVIIPVLNPIIYSLRNKQVIDSLAKFLKRNV

SEQ ID NO: 2480 - protein, 309 aa, Mus musculus
MEDGNTTLLTEFVLTGLTDHQGLQVPLFLLFLMIYLITVVGNLGLIALIWSDPHLHIPMYLFLGSLAFVDAWISSAVTPNMLFDLLSKNKMISLSECMIQFFAFAFGGTTECFLLGTMAYDRYVAICKPLLYPVIMTNRLCIRLLVSVFIGGFLHSLFHVLFLLRLTFCNSNIIHHFYCDIIPLYNISCTDPTLNLLLVFILSGSIQVFTIMTVLVSYTLVLFTILKMKSLQGIRKAFSTCGAHLLSVSLYYGPLLFMYVLPASQQTDGQGMMDSLFYTVIIPVLNPIIYSLRNKQVTDSLKKRLERHV

SEQ ID NO: 2481 - protein, 325 aa, Mus musculus
MTQTPTKSFLQMKHDEIEAEVNISTVIQFVLLGFSALPNLQGILSALFSIIYMIILTGNCLIILITRLDHTLHKPMYFFLANFSSLEICYVSVTVPRILFNIWTQDRNISVLACAVQMCFFLMLGTDECFLLAVMSYDRYVAICNPLHYPLIMNSKKCTQLAAGSWLSGIPIQIGQTCWIFSMHFCDSNEIDHFFCDIPPILKLACGDTSVHELSVYVVVMVVAAFPFILVLTSYSKIIATILRLPTAKGRAKAFSTCSSHLLVVVLFYGSGTITYLRPKSTHSPGIDKLLSLFYTIVTPMFNPLIYSLRNKEVVVALRKLILQK

SEQ ID NO: 2482 - protein, 285 aa, Mus musculus
MEPGNHTMVTEFIILGLTENPTLCCIFFVLFLGVYLTTILGNVSIIMLIRRSPQLHTPMYLFLSHLAFVDIGYSSSVTPVMIVSFLRERTAIPVAGCIVQLGSDVVFGTAECFLLAAMAYDRYVAICSPLLYSTLMSPKVCLILLVISYVGGCVNSSSFTSCLLSLTFCGPNKVNHFFCDLPPLVELSCTHVYVAEMSPAISAGSIIVITLFVIIISYVYILHSILRMRSTEGRHKAFSTCTSHLTAVTLFYGTVTFVYVIPESSHSPNKIKVVSVFYTVVIPML

SEQ ID NO: 2483 - protein, 313 aa, Mus musculus
MKNQSVKIEFILLGLTDDPQLQILVFLFLFFNYILSVMGNLVIILLTLLDPHLKTPMYFFLRNFSFLEIAFTTVCIPRFLMSILSGDRTISYNACAAQLFFFFLLGATEFYLLAAMSYDRYVAICRPLHYPIIMNSKVCHLLVLSCWVTGFLVIFPPLLLGLKLDFCASKTIDHFLCDTSPVLQLSCTDTHFIELMAFALAVMTLVITLILVILSYILIIKTILKFPSAQQRRKAFSTCSSHMVVVSITYGSCIFMYMKTSAKERVTLNKGVAVLNTVIKRVLTPGQEEHNKPESSAAKLYCLHLQEQECKKQ

SEQ ID NO: 2484 - protein, 324 aa, Mus musculus
MNETNYSRVTEFVLLGLSSSKELQPFLFLIFSLLYLAILLGNFLIILTVTSDPRLHTPMYFLLANLSFIDMCVASFATPKMLADFLVERKTISFEACLAQIFFVHLFTGGEMVLLVSMAYDRYVAICKPLHYMTIMSRRVCIILVCISWFVGFIHTTSQLAFTVNLPFCGPNKVDSFFCDLLLVTKLACIDTYVVSLLIVADSGFLSMSSFLLLVVSYTVILITVRNRSSASMAKARSTLTAHITVVVLFFGPCIFIYVWPFSSYSVDKVLAVFYTIFTPILNPVIYTLRNKEVKAAMSKLRGRYLKPGQVSALIRNVLFLETK

SEQ ID NO: 2485 - protein, 309 aa, Mus musculus
MKNKTSLTEFILLGLTDVPELQVAVFTFLLLAYVFSMIGNLTILVLTLLDSHLHTPMYFFLRNFSFLEISFTNIFIPRVLVSITTGNKSISFAGCFAQYFFAIFLGATEFYLLAAMSYDRYVAICKPLHYMAIMSNRVCTHLVLCSWLGGLMAIIPPITLMSQQNFCASNRLNHYFCDFEPLLELSCSDTSLIEKVVFLVASVTLVVTLMLVTLSYTFIIKTILKLPSAQQRTKAFSTCSSHMIVISLSYGSCFFMYVKPSAKVGGTFDKGVALLITSVAPLLNPFIYTLRNQQVKQAFKDTVKKLVNL

SEQ ID NO: 2486 - protein, 321 aa, Mus musculus
MNERNYSHVTEFVLLGLSSSKELQPFLFLIFSLLYLAILLGNFLIILTVTSDPRLHTPMYFLLANLSFIDMCVASFATPKMLADFLVERKTISFKACLAQIFCIHLFGGGEMVLLVSMAYDRYVAICKPLHYMTIMSRRVCITLVIMPWFVGFIHTTSQLAFTVNLPFCGPNQVDSFFCDLPLVTKLACTDTYFVSLLIVADSGVLTLSTFVFLVISYTVVLITVRNRSSASMAKARSTLTAHIIVVVLFFGPCIFVYACPLNGSSVDKVLAVFYTIFTPILNPLIYTLRNKDMKAAMSKLRGQYMKPRQVFELVRNVLFL

SEQ ID NO: 2487 - protein, 321 aa, Mus musculus
MNERNYSRVTEFVLLGLSSSKELQPFLFLIFSLLYLAILLGNFLIILTVTSDPRLHTPMYFLLANLSFIDMCVASFATPKMLADFLVERKTISFEACLAQIFCVHQFAGGEMVLLVSMAYDRYVAICKPLHYMTIMSRRVCITLVIIPWFVGFIHTMSQLAFTVNLPFCGPNQVDSFFCDLPLVTKLACTDTYFVSLLIVADSGVLTLSTFVFLVISYTVILITVRNRSSASMAKARSTLTAHITVVVLFFGPCIFIYAWPFNGYSVDKVLAVFYTIFTPILNPLIYTLRNKEVKAAMSKLRGRYLKPGQVSELIRNVLFM

SEQ ID NO: 2488 - protein, 316 aa, Mus musculus
MDRGNTTAGFVLLGLFNHTRAHLFLFVLVLTVAFNSVVGNALLLLLIHQDRRLHTPMYFLLSQLSLMDMMLVSTVVPQMAAGYLMGKKFISAAGCGFQIFFFLTLGGGECFLLAAMSYDRYVAICHPLRYPVLMSWQLCLRLTVASWLLGAADGAMQAAATLSFQFCSRNEIDHFFCEAPVLLRLACGDTSAFEFFMYICCVLMLLIPFSLILMSYGLILAAVLRMRSTEARKKAFATCSSHLAVVGLFYGAATFSYMRPTSSRSANHDKVVSAFYTIVTPMLNPLIYSLRNSEVKGSLRKCVTRCAALTSKDALA

SEQ ID NO: 2489 - protein, 315 aa, Mus musculus
MQDFLWRNRSSLTEFVLLGFSSNTQINGILFGIFLLLYLTTLLGNGLIITLIHMDSRLHTPMYFFLSVLSILDMGYVTTTVPQMLVHLVCKKKTISYVGCVAQMYIFLMLGITESWLFAIMAYDRYVAICHPLRYKVIMSPLLRGSLVAFCGFWGITCALIYTVSAMILPYCGPNEINHFFCEVPAVLKLACADTSLNDQVDFILGFILLLVPLSLIIVVYINIFAAILRIRSTQGRIKAFSTCVSHITVVTMFSIPCMVMYMRPGSESSPEEDKKLALFYNVISAFLNPIIYSLRNKDVKRAFLKVVGSRKGSE

SEQ ID NO: 2490 - protein, 312 aa, Mus musculus
MTRNFTSVTEFILLGLTSHVELQILFFVLFLVVYVVTVAGNLGMILLIKANARLHTPMYFFLSHLSFVDMCFSSNVTPKMLQIFLSERKTISYSACLVQCYLFIALVHVEFYILALMAFDRYMAICNPLLYGSKMSQSVCTSLITVPYVYGALTGLMETMWTYNLAFCGHNEINHFYCADPPLIKLACSDTYHKETSMLVVAGFNLSFSLLIILTSYLYIFPAILRISSTEGKRKAFSTCGSHLTAVIIFYATLFFMYLRPTSRESVEQGKMVAVFYTTVIPMLNPMIYSLRNKDVKEAISKELSHKKMYFS

SEQ ID NO: 2491 - protein, 297 aa, Mus musculus
LLGFTSDPTTQLVLFVMFLIMYTLSVLGNITLIVLICNDSRLHTPMYFFIGNLSFLDLWLSNVYTPKILAICISENKSISFASCVAQFFFSAGLDYSECYLLAAMAYDRYVAISKPLIYSQAISMKLCAFFVAASYMGGFINSSIITKKTFTFDFCNDNVIDDFFCDLLPLVNLACGGKEGYQALMYFLLTSNVMIPIALILASYIFIIATILRIRSTQGRMKAFSTCSSHLISVTLYYGSILYIYSRPRTRYSLDSDKVVSTFYTVVFPMLNPFIYSLRNKDVKEAMNKLFKIIPL

SEQ ID NO: 2492 - protein, 314 aa, Mus musculus
MGPANKSQLSPSTFWLMGIPGLEHLHVWIGIPFCSMYMVALMGNVTILAVVRAERTLHEPMFLFLCMLSVTDLVLSTSTLPRMLCLFWMAAHDITFDACLAQMFFIHSFTAMESGFFLAMAIDRYVAICDPLRHATILTHSRIAVMGAVVVLRGVGFFSPHPILLKQLPYCRTRIIAHTYCEFMAVVKLACLEIGATKRYSLGVAFGIGSCDCFFIAISYVLILRAVFRLPSREASLKALGTCGSHVCVIVVFYSTAGFTFLTHRFGHSVAPRTHILIANMYLLVPPFLNPIVYGVRTKKIRDYVLNTLKVKGS

SEQ ID NO: 2493 - protein, 310 aa, Mus musculus
MATENASVPEFILAGLTDQPGLRMPLFFLFLGFYMVTMVGNLGLITLIGLNSHLHTPMYFFLFNLSLIDFCYSTVITPKMLVSFVSKKNIISYSGCMTQLFFFLFFVVSESFILSAMAYDRYVAICNPLMYTVTMSPQVCLLLLLGVYVMGFAGAMAHTAFMVKLTFCADKLVNHYMCDILPLLERSCTSTYVNELVVFIVVGIDIGVPTVTIFISYALILSSILRISSTEGRSKAFSTCSSHIIAVSLFFGSGAFMYLKPSSLLPMNQGKVSSLFYTIVVPMLNPLIYSLRNKDVKVALRKTLSRSSFS

SEQ ID NO: 2494 - protein, 314 aa, Mus musculus
MFQILRDSSSSRFQVSEFILMGFPGIHSWQHWLSLPLALLYVLALIANILIVTFIYQEASLHQPMYHFLGILAIVDMGLATTIMPKILAILWFNAKAISFNECFAQMYAIHCFVAMESDIFVCMAIDRYVAIRRPLRYSSIVTESFVVKATVIMAFRNFVAPMSVPVLAAQRNYCSRNQINHCFCPNPGVTSLACDDRKIDSINQLFLAWAVMGSDLGLIIVSYALILPSVLRLNSPKAASQTLSTCTSHLILIFFFYTVIIVMPITHSAKMTVPVILLLLNVPHNVIPPALNPMVYALKNKELKEGFYLCSGW

SEQ ID NO: 2495 - protein, 319 aa, Mus musculus
MSASLKAFNSSKSQVSEFILLGFPGIHSWQHWLSLPFTLLYLSAIGTNVLILIIICQDPSLKQPMYLFLGILSVVDMGLATTIMPKILAIFWFDAKVISLPECFAQIYAIHCFVGMESGIFLCMAFDRYVAICYPLRYSSIITNSLILKATLFMVLRNGLCVIPVPVLAAQRNYCSRNEIDHCLCSNLGVTSLACDDRRPNSICQLILAWVGMGSDLGLIILSYTLILRSVLRLNSAEAVSKALNTCSSHLILILFFYTVVVVISVTHLSETKATLIPVLLNVMHNITPPSLNPIVYALRTRQLRQGFQKVLCRSLQEK

SEQ ID NO: 2496 - protein, 314 aa, Mus musculus
MAFLEDGNHTVVTEFILLGLTDDPVLRVILFIIILCIYLVTVSGNLSTILLIRVSSQLHHPMYFFLSHLASIDIAISSSVTPNMVVNFLVERSSISYIGCGIQLGSAVFFGAIECFLLAVMAYDRFVAICNPLLYSTKMSKQVCIQLLVGSYIGGFIHASFFTLSFVSFLFCGPNRINHFFCDFTPLVELSCSDNSVLIILDSFSTGTIIVITVFVIAISYTCILITILKMHSTEGRHKAFSTCTSHLTVVTLLYGTVTFIYVMPKSSYSTDQNKVISVFYMVVIPMLNPIIYSLRNNEIKGALKKQLGEKNIF

SEQ ID NO: 2497 - protein, 314 aa, Mus musculus
MAFLHNGNHTAVTEFILLGLTDDPVFRVILFTIILCIYLVTVSGNLSTILLIRVSSQLHHPMYFFLSHLASVDIGYSSSVTPNMLANFLVEKNTISYLGCTIQLSLAAFCGTVECFLLATMAYDRFMAICSPLLYSTKMSTQVCIQLIVGSYIGGFLNASSFTLFFLSFLFCGPNRINHFYCDFAPLVALSCSDVSVSEVVTSFFSGSVTMITMLVIAISYTYILITILKMRSTEGRHKAFSTCTSHLTAVTLFYGTITFIYVMPKSSFSTDQNKVVSVFYMVVIPMLNPLIYSLRNNEIKDALKRHLGKKIFS

SEQ ID NO: 2498 - protein, 308 aa, Mus musculus
MRNITEATFFVLKGLTDNNELQIILFLLFLAIYIFTLIGNVGLIILVVGDSQLHNPMYCFLSVLSSVDACYSTDITPNMLVGFMSKSKIISFYGCATQMFLAVTFGTTECFLLAAMAYDRYVAIHDPLLYAVSMSPRVYIPLIIASYAGGIVHAIIHTVATFSLSFCRSNEVKHIFCDIPPLLAISCSETYVNELLLFFFVSFIELVTILIVLVSYAFILLSILKMNSSEGRRKVFSTCGAHLTAVSIYYGTILFMYVRPSSNYSLEHDMIVSTFYTIGIPMLNPIIYSLRNKDVKEAMKRVLRKKIN

SEQ ID NO: 2499 - protein, 315 aa, Mus musculus
MWMIPGQNQSWVSEFILIGFSSDPTTNSILFIVFLLMYLSSVLGNGLIIMLVCLDTQLHTPMYFFLCTLSLLDMGYVTTTMPQMLVHLLAHSQTISFAGCWLQMYVFGALGMTECTFFVVMAYHRYVAICYPLRYTVILNWGLCIRLAGGSWICGLFSSLLHTFFTMSLPYCGPNRINHYFCEGPSVRSLACMDTHVIEMVDFVLSVFVVVIPISLIVASYIGIAMAILKIKSNQGRCKAFSTCASHLTVVTFFYAPASYIYMRPNSSYSPERDKQISLFYNVFTALLNPVVYSLRNKDIKRAFLKVMGHGRLAW

SEQ ID NO: 2500 - protein, 327 aa, Mus musculus
  VARIANT (289)...(296): Any amino acid
MERENQTGERNFLLLGFTEDSDLQSFFFGLLLSMYLVTITGNLLIIVAIISDPHLHMPMYLFLSNLSIADIGFTSTTIPKVLQNIRTQSKFISFSGCITQIFFFIVFGCLDNLLLSVMAYDRFVAICHPLHYVVIMNSCFCAMLALGSWIVSVMSSLPETLTVLRLSFCTNMEIPHFFCDLPEVLKLACSDTLVNNIVTYSITIVIAGFPFSGILLSYSKIFSSILRIPSAGGKYKAFSTCGSHLLVVFLFYSNGLGVYLSSAATSSSRMSLVASLMYSIVTPMLNPFXXXXXXXXFIYSLRISCIHTNMIINKKSQKFKRDTGTNC

SEQ ID NO: 2501 - protein, 317 aa, Mus musculus
  VARIANT (10)...(17): Any amino acid
SMIIWVCLLXXXXXXXXKVQLPLFLLFVAIYLITVAGNLGMIALIGISSHLHTPMYYFLSSLSFIDFCQSTVVTPKMLVSLLTKKNIISYSGCMVQLYFFISFGTAECYTLAVMAYDRYVAICNPLRYNVTMSYQIYSSLISGVYIYAVFCASVNTGFIIRIQFCKLNVINHYFCDLLPLLKLACSNTYINEILILFFGSVNICVPMLTVITSYIFIIASILRIRSSEGKFKAFSTCSSHISAVAILYGSTAFTYLQPSSVSLVDQGKVSSVFYTTVVPMLNPLIYSLRNKDVTLALKRILEQKRLYVSRSRVKIIN

SEQ ID NO: 2502 - protein, 286 aa, Mus musculus
LPLFVLFLMNYTATVMGNLSLMSLICLNSNLHTPMYFFIFNLSFIDFCYSLVSTPKMLMSFLLEKNTISFRGCMTQLFFYCVFVNSESYVLTAMAYDRYVAICQPLMYKIIMSPKICCLLIFGSFLMGFVSAIIHTGCMVRLSFCHSKIINHYMCDIFPLLQLSCSSTYVNELMSYVVVGTSIILCCLIILISYAMILFSIIHMSSGKGWSKALGTCGSHIITVSLFYGSGLLAYVNPSSAETVGQAKFFSVFYTLLVPMLNPLIYSLRNKDVKLAVKKTWKRITS

SEQ ID NO: 2503 - protein, 330 aa, Mus musculus
MAFLEDGNHTTVTEFILLGLTDDPVLRDILFIIILCIYLVTVSGNLSTILLIRVSSQLHHPMYFILSHLASVDIGISSSVTPNMLATFLVKQNTISYIGCSIQFTSAAFFGTVECFLLATMAYDRFVAICNPLLYSTKMSTEACIQLVVGSYIQGFLNASFFTLSFFSLFFCGPNRINDFYCDFAPLLELSCSDVTVAVVITSISAGFITLTTVFVIAISYSCIFITIMKMHSTESRCKAFSTCTSHLTAVILFYGTAIFIYVMPKSSYSTDQNKVLSIFYTVVIPMLNPLIYSLRNNEIKEALKRHLGKKVFSYGNLFCKTHYNHNYPV

SEQ ID NO: 2504 - protein, 317 aa, Mus musculus
MTERMSLYNVTEVHPSSFLLLGIPGLENAHIWIGFPFCLLYLIAVLGNGAVLFVIQAEHSLHEPMYYFLAMLDSIDLGLTTATIPKMLGIFWFNLREISFGGCLSQMFFIHFFTAMESIMLLAMGFDRYIAICKPLQYTVILTNKVIGVIAGIAVLRSLYMVLPLVFLLLRLPYCGHQSIPHTYCEHMGIARLACASIKVNIMFGLSNIALLLLDVVLIILSYVRILYAVFCLPSREARLKALNTCGSHIGVILTFFTPAFFSFLTHRFGHNVPQYIHIFLANLYVVVPPALNPVIYGVRTKQIREQVMRILFRKDH

SEQ ID NO: 2505 - protein, 333 aa, Mus musculus
MTPLLYFAPLRAARGSTAATRGQNDSSVAEFILLGFSAFPELQGQMFGAFLVIYLVTLMGNATIVAVILLDQSLHIPMYLFLQNLSVVEMSFSAAITPEMLVVLTSEKATISFGGCFAQMYFILLFGGTECFLLGAMAYDRFAAICHPLSYPMIMNKRVFVKLVIFSWVSGIMVATVQTTWVFSFPYCDHKEINHLFCETPPVLELACADTFLFEVYAFTGTILIVMVPFLLILLSYTRILFSILRMPSTTGRQKAFSTCASHLTSVTLFYGTASITYLQPKSRYSPDTKKLMSLAYTLLTPLLNPLIYSLRNKEMKRAVLKLWQRKVALHRG

SEQ ID NO: 2506 - protein, 309 aa, Mus musculus
HSSTVEFILLGFSNYPELQGQMFGAFLVIYLVTVLGNAIIITIIFLDQSLHIPMYLFLQNLSLVDFCFSTVITPEILVILTSEKATISFGGCFVQMYFILLFGATECFLLGAMAYDRFAAICHPLTYPVIMSKRTFVKLVMCPWVLSIMTAVLSVTWVASFPYCDHKEINHLFCEIPPVLELACADTFLFEVYAFTSTILIVMVPFLLILLSYTRILFSILKMPSTTGRQKAFSTCASHLTSVILFYGTASITYLQPKSGYSPDTKKLMSLAYTLLTPLLNPLIYSLRNKEMKRAVVKLWQRKVTLHTG

SEQ ID NO: 2507 - protein, 321 aa, Mus musculus
MGFSNWTTAQEFIFSAFPCSWGDSVICFIPLLFIYAFIIVGNLVIITVVQLNAHLHTPMYFFISALSFLEIWYTTATIPKMLSSLLSERRSITLNGCVLQMYFFHSTGISEVCLLTAMAFDRYLAICSPLHYPTIMTSRLCAQLTLGCCVCGFLTPLPEIAWISTLPFCGSNHLEHIFCDFLPVLRLACTDTHTIVMIQVVDIVHAVEIITAVMLIFMSYVGIVAVILRIRSAEGRRKAFSTCVSHLTVFLLFFGSVALMYLRFSATYSLFWDTAIALAFAVLSPFFNPIIYSLRNKEIKEAIKKHIGQAGILIGKSRNLP

SEQ ID NO: 2508 - protein, 315 aa, Mus musculus
MHSRGWRNHSSVTEFILLGFSRNPRTNWILFFLFLFLYLFTILGNGLIVTLIRIDARLHTPMYFFLSILSLLDLSYATTTVPQMLAHLVSKTKTISYTGCVIQMYIFLTLGITETWIFAAMAYDRYVAICYPLHYGVKMSQTLCIALVVSSALCGLICALVYTVFAMNLPYCGPNEINHFFCEIPAVLKLACADTSLNDQVDFILGFILLLIPLSLILASYVRIFIAILRIRSTQGRMKAFSTCASHITVVTMFCVPCMVMYMRPGSEASPEDDKKLALFYNVISAFLNPIIYSLRNKDVKKAFFKLIGRGEDTQ

SEQ ID NO: 2509 - protein, 314 aa, Mus musculus
MSYLENSTKVTTFILLGLTDIPELQVPLFVTFSLIYLITLIGNLGIIVLIWLDFRLHTPMYIFLSHLSLADCVYSSAVTPKVMVGFLTGDKVISYGGCVAQMFFFVAFASVDCFLLAVMAFDRHAAVCKPLHYTTTMTTSVCARMVIACYSWGLFESAIHTGFTFSLPYCANVVHHFFCDIPPILALSCSDIYVNEIVLFILASFNVFFALIVILTSYAFIFIAILRMHSAEGRKKAFSTCASHLTAVTIFYGTVIFMYLQPSSSHSMDNDQMASVFYTTIVPMLNPVVYSLRNKEVHNAFKKVVEKMNTLLNS

SEQ ID NO: 2510 - protein, 312 aa, Mus musculus
MTLVKNWTYVTEFILLGLTDDPGLQLPLFVIFLLIYIITLVGNLGMILLIFLDSQLHIPMYFFLGNLSLVDVCYSSAVTPKVIAGLLIGDKFISYNDCAAQMFFFAAFATVENYLLASMAYDRYVAVCKPLHYTTTMTSNVCICLIMGCYGFSFLNVSVYLGDTFSLSFCNSNVVHHFFCDMPAIMALSCSDKHVNELVLIYLASFNIFVAFIMIIVSYLIIFITILNMRSRAGVQKALSTCVSHLTAVFIFYGTIIFMYLQPSSRHAMDTDKIVSVFYTMVIPMLNPLVYSLRNKEVKSAFMKIVLKEKSL

SEQ ID NO: 2511 - protein, 314 aa, Mus musculus
MENISEVTEFILMGITDAPELQIPLFIIFTLIYLIALFGNLGMIMLILLDSRLHSPMYFFLCNLSLVDCVYASAVTPKVMEGFLTGNKIISYNACAAQMFFFVAFGAIESLILASMAYDRHAAVCKPLHYTTIMTSTTCILIVTCCYMCGILQSSIHVALAFCLSFCNSNVINHFFCDIPPLLDISCSDTYTNEITVLILGTCDGILTLLVILNTYLLIFIAILRMRSAEAQRKAFSTCASHLITVFIFFGSTLFMYLQPSSNHSMDTDKIASVFYTMVIPMLNPVVYSLRNKEVKNAFKKVVGKLMTSLQLVN

SEQ ID NO: 2512 - protein, 322 aa, Mus musculus
MGDKERDNHSEVTDFIHHSEVTDFILVGIRVRPELHSVLFLLFLIIYGMVLLGNLSMIGIIVTDPRLNTPMYFFLGNLSVIDLSYSTVIVPKAMVNILSQKKTISFVGCAAQLFLYALFMVTEAFILAAMAYDRFIAICNPLLYSVRMSRSVCVQLVAGSYLCGWVSSILQISVTFSMSFCASRVIDHFYCDSNPIEKISCSNTFINKMVSLSLAVLIILPTIIVIVVSYMYIVSTVLKIHSSEGRKKAFSTCSSHLGVVSLLYGTVSFVYLTPPNNPELRKIASVCYILFTPMLNPLIYSLRNKDVKDAMKKVLCKQKVLL

SEQ ID NO: 2513 - protein, 328 aa, Mus musculus
MITHFSVVSVFLTAFGSKNSSIHFVTEFILLGFSNQGEMQSFFFCSILILYLLTLLGNGTIVCAVRWDQRLHTPMYIFLGNFAFLEIWYVSSTIPNMLVNILSENKTISFSACFLQFYFFFSLGTTECFFLSAMAYDRYLAICRPLHYPSIMTRKFCVILICICWVSGFLCYPVPIVLISQLPFCGPNIIDHFVCDPGPLFALSCVPAPSTELLCYTFNSMIIFGPFFCILGSYTLVLRAVFRVPSGAGRTKAFSTCGSHLVVVSLFYGTLMVMYVSPTSGNPAGMQKIVTLIYSALTPLLNPLIYTLRNKEMKNALKKLLKLTIIQN

SEQ ID NO: 2514 - protein, 314 aa, Mus musculus
MNVSEGSTVTYFVLLGFPGPWKIQITLFSLILLLYMITLTGNMAIICAVRWNQQLHTPMYMFLANFSFLEIWYVTCTVPNMLINSLSKTKTISFTGCFTQFYFFFSLGTTECFFLCAMAYDRYLAICYPLHYPSIMTRQFCSILMSLCWIIGFSAHLIPIFLISQLSFCGPNIIDHFLCDVDPLIALSCTPTHIISHVFYSISTLIIILTGLYILGSYALVLRAVLQVPSSDGRQKAFSTCGSHLLVVSLFYGTIMVMYVSPTSGNSVDMNKIITLIYSVVTPALNPFIYSLRNKDMKYALHHVFFGNSIMQNL

SEQ ID NO: 2515 - protein, 314 aa, Mus musculus
KNKNSSDVSRFVLLGLSSSWELQLFLFFTFLLIYLVIVLGNLLIVMVVQADAHLFQSPMYYFLSHLSFIDLCLSCVAVPKMLGDFLQKEKTISFSGCLAQVFFLHFLGASEMFLLTVMAYDRYVAICNPLHYLTVMNNHLRLRLVFGCWCGGFIHSITQVMIVIQLPFCGPNELDNFYCDVPQVVKLACMDTYLVEVLMVSNSGILSLVCFLVLLFSYALILITLRTHLHRGQSKALSTCASHLTVVSLIFVPCVFIYLRPFCTFSVDKVVSVFYTVITPMLNPLIYTLRNADMKQAIEKLRKKQVASHCFAKG

SEQ ID NO: 2516 - protein, 326 aa, Mus musculus
MQSKYVNLQRANKFKITDTNLSVPIEFVLLGFSDIPQLHWFLFGIFFFIYMIILLGNGLIILITRVEPTLQTPMYFFISNLSFLEICYVSVTLPRMLMDLFTLKGNISFLACATQMCLFLILGGTECFLLAVMSYDRYVAICNPLHYPIVMSSKVCTQLVVGSWVIGVPIQVGQTYQILSLPFCESNQINHFFCDMPPLLRLACGNIFVNELVVFIFVVLIVTIPFMLILASYSRIISTILKLPSKTGRTKAFSTCSSHLIVVFLFYGSASITYLKPKSNKFEGTDKLLSLFYTILTPMFNPLIYSLRNKDVTGALKKLFTRLLAL

SEQ ID NO: 2517 - protein, 310 aa, Mus musculus
MGANQTWVTDFILVGLQLSAGIEMFLFWIFSLLYIFSLLANGIILVVICLDPKLHTPMYFFLSHLAILDISYASNNVPKMLSNLINQKRTISFAPCITQTFLYLAFAASECLILAAMSYDRFVAICHPLHYTVIMSWKVCVALAVTSWSCGFSLSVAHTILLLRLPFCGPQEINHLFCEILAVLKLACADTLINQIVILAACVFVLVGPLCSMLVSYTHILWTILKMQSKEGRRKAFSTCSSHLCVVGLFFGIAMLVYMVPDSDQREEQEKILSLFHSLFNPMLNPLIYSLRNTQVKEAFHRALQKKRSV

SEQ ID NO: 2518 - protein, 308 aa, Mus musculus
MNQTWITEVILLGFQVDPSLEMLLFGLFLLFYCLTLMGNGIILGLICLDARLHTPMYFFLSHLAIVDMSYASSTAPKMLTNMVMHQKSISFASCILQTFLYLAFAVTECLILVVMSYDRFVAICHPLKYTLIMSWRVCSILAATCWVFSFLLASLHITLILRLPFCGPQKVNHFFCQIMSVFRLACADTRLNQVVLFAGSVMVLLGPLCLVLVSYTRILVAILGIHSGEGRRKAFSTCSSHLCVVGLFFGCAIAMYMAPKSKHSQEQRKILSLFYSLFNPMLNPLIYSLRNTEVKGALRRVLWKQRSL

SEQ ID NO: 2519 - protein, 316 aa, Mus musculus
MAYEVVNQSSATTFILVGFSEYPQLQIPLFLLFLTIYSVTLMGNLGILVVIKVNPKLHTPMYFFLSHLSFLDICYSSVFTPKLLQILIMEDRTISFIGCMIQFFFICTFVITEMFMLAVMAYDRFVAVCNPLLYTVVMPIQFCALLVAGTYMIGGLCTLIILYTLLQLCYFEYGIINHFGCEYSAVISVSCSDSSFSQLICLVISIASEFSSVLITLASYVFIVVTIIKMPSKGGLQKAFSTCTSHLTAITIFHGILLLLYCIPNSNSSRLFVKVATALYTIMIPMLNPLIYSLRNKDVKDTVRRLISSKLHSHLT

SEQ ID NO: 2520 - protein, 314 aa, Mus musculus
MQRRMEGENCSSFTEFILMGITNNSEVKVVLFTIFLLVYLINLIGNLGMILLIKVDPQLQTPMYFFLSNLSFCDLCYSTAVGPKMLMDIFGNDKSIQFFGCALQFFISCTFVDSECILLAVMAFDRYQAISNPLLYTTNMSNRLCSLLVAGVYFVGVADSLIHTTLTFHLCFCGSNEIDHFFCDIPPILLLSCSDTQVNELAIFTIFGFIELSTISGVLVSYCYIISSVLKISSAGGRFKAFSTCASHLTAVAIFQGTVLFMYFRPSSSYSLDQDKMSSLFYILVIPMLNPLIYSLRNKDVKEALKNLKNKRCC

SEQ ID NO: 2521 - protein, 332 aa, Mus musculus
MLPFNDEDEFSLFRYSRTMHQGNQTAISGFILLGLTVGSEQQLLLFTLFLCMYLVTMVGNSLIILAIISDTHLYSPMYFFLANLSFTDICFTTTTVPKILADIQSQNPTISFVGCFTQMYFFMFLVDLDNFLLAAMAYDRYIAICHPLHYAALLNPKRCALLVVVPWVISNLVSVLHLSLLSRLPFCDQRVIPHFFCDLEPVLRLACSDTQINNLLILIVGGTVIFVPFVFILVSYALIGTAVLNVPSVKGKWKTFSTCGSHLSAVSLFYGSIVGVYFLPASSYSAERDKVAAIMYTVVTPMMNPFIYSLRNKDMKRALRRLLSQKSLICSW

SEQ ID NO: 2522 - protein, 315 aa, Mus musculus
MMQNISELSEFILLGLTDAPFLQTPLFIIFTLIYLTTLFGNLGMILLILLDSRLHTPMYFFLSNLSLVDCVYASAVTPKVIEGFLTENKIISYNACAAQMFFFVAFAITECFILASMAYDRHAAVCKPLHYSTTMTTTICVLLLAGSYLSGLLQSSIHVSFTFHLSFCRSNVVNHFFCDIPPLLALSCSSIHINEIILFMLAGFNVVFSLLVILTSYLLISVAIVRMRSAESRKKAISTCASHLTTVSIFYGTIIFMYLQPSSNHSMDTDKMASVFYTMVIPMLNPLVYSLRNKEVKNAVRKVAGKALFSLGLVN

SEQ ID NO: 2523 - protein, 320 aa, Mus musculus
MNVSFKTGFLLMGFSDERNLQILHAVLFLITYLLAIMGNLLIITIITLDQRLHSPMYYFLKHLSFLDLCFISVTVPQSIANSLMNNGFISLGQCMLQVFFFIALASSEVAILTVMSYDRYVAICRPLQYETIMDPHACKCAVIAVWMAGGLSGLLHTGVNFSIPLCGKRIIHQFFCDIPQMLKLACSYEFINEIAVAAFTTSTAFVCLIAIVFSYTQIFSTVMRIPSADSRTKVFSTCLPHLFVVMFFLSAAGFEFLRPPSDSLSAMDLIFSIFYTVIPPTLNPLIYSLRNEAMKAALRKVLSKEEFSRRMVYVKAIFNL

SEQ ID NO: 2524 - protein, 312 aa, Mus musculus
MIVENITTMRGFLLMGFSDNHELQILQALLFLVTYLLGSAGNVIIITITTLDPQLQSPMYYFLKHLSILDLSSLSVTVPQYVDICLTQSGYISYAQCMLQIFFFTGFAWGEVAILTVMSYDRYVAVCLPLHYEVIMGPSKCRWAVTAVWLSSVIPGTLYIASIFSIRFCGDRIIHQFFCDVPQVLKFSCSDDYLVTVGVADFLSAVAFACFIGIVNSYVHIFSTVLRMPSAESRSKVFSTCLPHLFVVLLFLSTGIFAYLNPTSDSPTALQFLVSIFYTVLPPTLNPVIYSLRNETIKSVIRKLLLSSKFTG

SEQ ID NO: 2525 - protein, 330 aa, Mus musculus
MICCPFFQEMSINCSLWQENSLSVKRFAFAKFSEVPGECFLLFTLILLMFLVSLTGNSLIALAICTSAALHTPMYFFLANLSLLEIGYTCSVIPKMLQSLVSEARGISREGCATQMFFFIFFGITECCLLAAMAFDRYMAICSPLHYATRMSRGVCAHLAIVSWGMGCIVGLGQTNFIFSLNFCGPCEIDHFFCDLPPVLALACGDTSQNEAAIFVAAVLCIFSPFLLIISSYVRILIAVLVMPSREGRHKALSTCSSHLLVVTLFYGSTSATYLRPKSDHSPEVDKLLALFYTAVTSMLNPIIYSLRNKEVKAALRKTLSLKKVLIMNR

SEQ ID NO: 2526 - protein, 312 aa, Mus musculus
MIMENITTMSGFLLMGFSDNHELQILQAVLFLVTYLVGSAGNVIIITITTLDPQLQSPMYYFLKQLSILDLSSLSVTVPQYVDSSLARSGYISYGQCMLQIFFFTWFAWGEMAILTVMSYDRYIAVCLPLHYEIIMCPRKCRWAVTAVWLSSSIPGTLYLATIFSIRICRAKIIHQFFCDVPQLLKLSCSNDYLVIMGVADFLSVIGFACFVGIVISYVHIFSTVLRMPSAESRSKVFSTCLPHLFVVSLFLSTGIFAYLNPTSDFPTALEFLFSVFYTVLPPTLNPVIYSLRNDAIKSVVRKLLLSRKFTS

SEQ ID NO: 2527 - protein, 315 aa, Mus musculus
MIMENITTMSGFLLMGFSDNRELQILQALLFLVTYLVGSAGNCIIITITTLDPQLKSPMYYFLKHLSILDLSSLSVTVPQYVDSSLARSGYISYEQCMLQILFFTCFAWDEMAILTVMSYDRYVAVCLPLHYEVIMSPRKCTWALAAVWLSGGVSGTLYTASTLSIRFCGDRIIHQFFCDVPQVLKLSCSNDYLVTIGVANILSAVAFACFIGIVISYVHIFSTVLRMPSAESRYKVFSTCLPHLFVVSLFLSTSTFAYLNPTADSPTALEFLFSILYTVLPPTINPVIYSLRNETIKRVVRKLLSSTKFTVRII

SEQ ID NO: 2528 - protein, 330 aa, Mus musculus
MICCPFFQEMSVNCSLWQENKLSVKHFAFAKFSEVPEECFLLFTLILLMFLVSLTGNALITLAICTSPALHTPMYFFLANLSLLEIGYTCSVIPKMLQNLVSEIRGISREGCATQMFFFIFFGITECCLLAAMAFDRYMAICSPLHYATRMSREVCAHLALVSWGMGCIVGLGQTNFIFSLNFCGPCEIDHFFCDLPPVLALACGDTSQNEAAIFVTVVLCISSPFLLIIYSYVRILFAVLVMPSPEGRHKALSTCSSHLLVVTLFYGSASITYLRPKSSHSPGIDKLLALFYTAVTSMLNPIIYSLRNKEVKAALRRTLSLKKPLAINR

SEQ ID NO: 2529 - protein, 316 aa, Mus musculus
MANSTLVTNSTLVTEFMLEDFAETWELRILLSVLFLLVYMGSLLGNLTIIIATTVDQTLNTPMYFFLRNLSILDMCYISVTVPNACINSLTDHRNISVAGCVAQVFLVLFCAAVEIQFLTIMAQDRYVAICKPLLYPMIMNHQYCIQMTLASLLTSLILASVHTSKTFQLSFCHSKVIPHFFCDIPSLLRLSCSDTFNNKLLLLLTAIGLSGSCFTFIAISYARILSAVLKVPVKGERGKAFSTCVPHIIVVSVFLSSAAYVYLRPPVVTLEVVQEMTLSVFYTIVPPFLNPIIYSLRNRQIKEAVKKVVLRITFI

SEQ ID NO: 2530 - protein, 323 aa, Mus musculus
MEDSSMSNDTRITGFILMGFSAAPELQTVCGLFFLVMYVAVIMSNLLLITLITLDLKLQTPMYFFLKNLSLLDIFFISVPIPNFFINSITHNNSISILGCALQVFLMTSFASGDVFVLTAMSYDHYVAICCPLHYETIMSSGNCVLMVGVSWAIGVLFGALYTAGTFSMPFCGSIVIPQFFCDVPSLLRISCSDILVVIYTSLGMGVCLGMSCFICVVISYFYIFSTVLKIPTTKGQSKAFATCLPHLTVFSVFIVTACFVYLKPPSVVPSISDRLFSVLHTVLPPALNPVIYSLRNSDVKRALKRLQQNLCPSGSLHVTIQS

SEQ ID NO: 2531 - protein, 319 aa, Mus musculus
MLNATRITGFILMGFSVAPELQTVCGLFLLVMYLAVIMSNLLLITLITLDLKLQTPMYFFLKNLSLLDVFFISVPIPNFFINSITHNNSISILGCALQLFLMTSFGAGDVFVLTAMSYDRYVAICCPLHYETIMSSGNCVLMVGVSWATGILFGALYTAGTFSMPFCGSMVIPQFFCDVPSLLRISCSDTLVVIYISLGIGFCLGMVCIICVVLSYFYIFSTVLKIPTTKGQSKAFGTCIPHLTVFSVFIATACFVNLKPPSRSASIADSLFSVLYTVLPPALNPVIYSLRNTDVKCALRSLQKILCPRDSLHLRVQSI

SEQ ID NO: 2532 - protein, 310 aa, Mus musculus
MQSGNQTSVSHFILVGLHHPPQLGVPLFLAFLVIYLLTVSGNGLIILTVLVDIRLHRPMYWFLCHLSFLDLTISSAIVPKMLSGFLLDSRIISFGGCVIQLFSFHFLGCTECFLYTLMAYDRFLAICKPLHYATIMTRSVCNYLALGTWIGGTIHSLFQTSFIFRLPFCGPNRVDYFFCDIPAVLRLVCADTTINELVTFVDIGFLALTCFMLILTSYGYIVAAILRIRSADGRRNAFSTCAAHLTVVIVYYVPCTFIYLRPGSQEPLDGVVAVFYTVITPLLNPIIYTLRNKQMKAALRRLGGLREVHP

SEQ ID NO: 2533 - protein, 313 aa, Mus musculus
MRNHTSVTEFILLGIPTVKEGLESMLFALFLVFYVFALLGNLLIFLTILASPNLHTPMYFFLGNLAVFDIFFPSVNSPKMMDYLVRQGRTISYQGCVSQVFFYHTLGGTECFLYTVMAYDRFVAICHPMRYTVIMNHRVCTCLTLGTWVGGFVHGSILTFLIFKLPYCGPNKVNSFFCDIPVVLSLACADTSLARTVSFTNVGVVALTCFLLILTSYTRIVISILKIRSSEGRRRAFSTCSAHLTSIILVYGPVILVYLRPASSPWLDSVVQVFNNVITPSLNPLIYTLRNKDVKLALKKVVSQGAQPLGYKE

SEQ ID NO: 2534 - protein, 314 aa, Mus musculus
MEVCNSTLRSGFILMGILDDNDFPELLCATITALYLLALTSNGLLLLVITMDARLHVPMYLLLWQLSLMDLLLTSVITPKAILDYLLKDNTISFGGCALQMFLALTLGTAEDLLLSFMAYDRYVAICHPLNYTILMSQKVCCLMIATSWSLASLSALGYSMYTMQYPFCKSRQIRHLFCEIPPLLKLACADTSTYELMVYLMGVTLLFPALAAILASYSLILFTVLHMPSNEGRRKALVTCSSHLTVVGMWFGGAIVMYVLPSSFHSPKQDNISSVFYTIFTPALNPLIYSLRNKEVTGALRRVLGKSLVSTVY

SEQ ID NO: 2535 - protein, 315 aa, Mus musculus
MYTWNHTNMPDFILMGLTDSKEIQLILSVLFLLIYLVTVLGNIGMILIIYIDTQLHTPMYFFLTHLSVVDLSYSTAITPKTLENMLTTNKSISYTNCFAQLYIFILLAATECFLLSSMAYDRYIAICNPLHYPVIMSPRCCLALLTGSYVIGAVDSTLTVFSMITLHFCKSNVIRHFYCDTSPLLSLSCSDTHVVEIIIFIFAGSTILGSLITISGSYVSILSTILNINSTSGKQKAFSTCASHLLGVTVFYSTLIFTYLKPTKSYSLGKEEVASVFYTIVIPMLNPLIYSLRNKEVKSAVVRLVKTRQGSRKLI

SEQ ID NO: 2536 - protein, 317 aa, Mus musculus
MKAYSEAKHNGTEATEFILLGLSTRPELQPILFLVFLTIYLITLTGNFGMILLIRFTPQLQTPMYFFLTHLACVDIFYSTNVSPQMLVNFLSEKKTISYIGCLTQCFVFVTLLLTEYYMLGAMAYDRYMAICKPLHYSTKMSRPVCICLVTFPYFWGSMVGTMQVILTSRLSFCGPNTINHFYCADPPLLMLTCSDTYIKQTALFVSAGINLTGSLLIILISYIFIFITIMRIRSSEGQRKAFSTCGSHLTAVTMFYGSLFCMYLRPANERSVEQGKIIAVFCIFVSPMVNPFIYSLRNKDVKQALRRVFIRNLCKV

SEQ ID NO: 2537 - protein, 314 aa, Mus musculus
MEEKNQTVMPEFLFRGITDNLHQKIVIFIIFFFVYLVTLGGNVGMITLIWLDPRLHTPMYFFLSQLSFVDVSSSSSIAPKMLCDIFARNKAISFVGCATQMWFFGLFVATECFLLAAMAYDRYAAICKPLLYTLIMSPHLCMLLVVGIYFIALISTMIHTTLTFCLPFCGPYIINHFFCDVSPLLSLACTDTQMIKLVFFVLAGTVGMFTGLIILGSYVCILKAILKIQTANGRQKAFSTCSSHLVTVAILYGTLFFIYVRPNASSSLNINKVISLFYTVVIPMLNPLIYSLRNQEVKNAFRRTLKKKHFLIGV

SEQ ID NO: 2538 - protein, 315 aa, Mus musculus
MEIENHTLITKFLILGLSDDPELQPILFGLFLSMYLVTLLGNLLIILAVSSDSHLHKPMYFLLSNLSFIDICFISTTIPKMLVNMQSQIKDISYIECLTQVFFFNIFAGMDNFLLTLMAYDRFVAICHPLNYTVIMNPRLCALLILMFWIIMFWVSLIHVLLMNELNFSRGTEIPHFFCELAQVLKVSNSDNHVNNVFMYVVTSLLGVIPMTGILMSYSQIFSSLFRMSSTVSKYKAFSTCGSHLCVVTLFYGSGFGVYFSSSVVHSTQRRKVASLMYTVISPMLNPFIYTLRNKDVKGALGKLFNRVASSPSCI

SEQ ID NO: 2539 - protein, 318 aa, Mus musculus
MKNQSVEIIFILLGLTDDPQLQILIFLFLFFNYILSLMGNLVIILLTLLDPRLKTPMYFFLRNFSFLEIAFTTACIPRFLMSILTGDRTISYNACAAQFFFFSLLLVTEFYLLAAMSYDRYVAICRPLHYPIIMNNRMCHLLVLSCWVTGFLIILPPLVLGLKLDFCASKTIDHFLCDTSPLLQLSCTDTHFMELMAFVIALMTLVITLILVILSYTLIIKTILKFPSAQQRKKAFSTCSSHMVVVSITYGSCIFMYMKTSAKERVALNKGVSVLNTSVAPLLNPFIYTLRNQQVKDAFKQVLHRLYSHNSELRFRPK

SEQ ID NO: 2540 - protein, 312 aa, Mus musculus
MRNHTSITTFILLGLTDDPQLQVLLFIFLFITYLLSVTGNLTIITLTTVDPYLKTPMYFFLQNFSFLEISFTSACVPRFLYSISTGDRTITYNACATQLFFTDLFGVTEFFLLAIMSYDRYVAICKPLHYMTIMNNKVCRIMVISCWMAAFMIILPPLSLGFHLEFCDSNIIDHFGCDANPILKISCSDTWLIEQMVIGSAVLTFIITLLCVVFSYMYIIRTVLKFPSAQQKRKAFSTCSSHMIVVSITYGSCIFIYVKPSAKEAVTINKGVSVLISSISPMLNPFIYTLRNKQVKQASQDLIKKIAFLLKK

SEQ ID NO: 2541 - protein, 313 aa, Mus musculus
MKNQSMEILILLGLTDDPQLQIVVFLFLFLNYVMSLVGNLIIVLLTLLDPRLKTPMYFFLRNFSFLEIMFTTVCIPRFLTTIVTGDKTITYNNCAAQLFFILLLGVTEFYLLAAMSYDRYVAICRPLHYPIIMNSKVCHQLVLSSWVTGFLIIFPPLAMGLKLDFCDSRIIDHFMCETSPILQISCTDTHVLEMMSFVLAVVTLVVTLVLVSLSYSFIIKTIMSFPSAQQRTKAFSTCTSHMFVVSITYGSCIFMYIKPSARERVSVSKGVALLYTSIAPLLNPFIYTLRNQQVKEVFWDVLQKTLGFSKHKF

SEQ ID NO: 2542 - protein, 313 aa, Mus musculus
MEKENQTSVSEFLLLGFSSWPGHQGLLFALFLCLYLTGLFGNLLILLAIGSNNHLHTPMYFFLANLSLVDLCLPSATVPKMLLNIQTKSQSISYPGCLAQMYFCMMFANMDNFLLTVMAYDRFVAICHPLHYTTIMTPCLCTSLVAFSWVIATFNPLLHTLMMARLHFCSENIIHHFFCDINSLLPLSCSDTSLNQLMVLSVVGLIFVVPSVCILASYGRIVSAVMKITSMEGKLKAFSTCGSHLALVILFYGAIAGIYMSPSSNHSTEKDSAASVIFMVVAPVLNPFIYSLRNNELKGTLKKTLGQSKICSK

SEQ ID NO: 2543 - protein, 280 aa, Mus musculus
LLTLMGNLGILVVIKVNPKLHTPMYFFLNHLSFLDICYSSVFTPKLLQILIMEDGTISFIGCMIQFFFICTFVITEIFMLAVMAYDRFVAVCNPLYYTLIVMPIQFCALLVAGTYMISGLCTLIILYTLLQLCYFEHGIINHFGCEYSAVISVSCSDSSFSQLICLVMSIASEFSSVLITLASYVFIVVTIIKMPSKGGLQKAFSTCTSHLTAITIFHGILLLLYCIPNSNSSRLFVKVATALYTIMIPMLNPLIYSLRNKDVKDTVRRLISSKLHSHLT

SEQ ID NO: 2544 - protein, 313 aa, Mus musculus
LYSIQENQSSTVTFILVGFSEYPDIQLPLFLLFLTIYTVTVLGNLGMIAIIRLSPKLHTPMYFFLSHLSFVDFCYSTVVTPKLLENLIVEDRRISFTGCVMQFFFVCIFVVTETFMLAVMAYDRFVAVCNPLLYTVAMSQKLCWSLVAGSYSWGIICSFVFIHFMLTLVFCGTKFINNFVCEHDAIVAVSCSDPFISQKVIFIFATFNELSSLMIILTSYVFIVITVMKMPTTGGRYKVFSTCASHLTTITIFHSIIICLYCVPTTKSSWLLVMVASVFYTVVIPMLNPLIYSLRNKDVKDAVKKLMCSSLSS

SEQ ID NO: 2545 - protein, 312 aa, Mus musculus
QLRDRGNQTNSVIFILLGFSEYPDLQVPLFFVFLIIYTITVLGNLGMIGIIRINTKLRSTPMYFFLSHLSFVDFCYSTVVTPKLLENLIIEDRTISFSGCIIQFFFACTFVVTETYMLAVMAYDRFVAVCNPLLYTVAMSPKLCSILVGASYSWGLICSLTLTYFLLRLSFQGINIINNFVCEHAAIVAVSCSDPYISQEIIFVSASFNEISSLIIILTSYVFIFITVMKMSSIGGRSKAFSTCASHLTAIIIFHGTILFLYCVPNTKSSWLMVKVASVFYTVFIPMLNPLIYSLRNKDVKESVRKLVTKSL

SEQ ID NO: 2546 - protein, 312 aa, Mus musculus
MEPGNQTGAYYFYLTELTSDPTMELLIFSLFLFIYLVTILGNLLIIIAVSSDSHLQTPMYHFLSKLSFADICLSTTTIPNMLKNIHTQDQSISYTGCLIQACFVLNFALVESCILAAMAYDRYAAICHPLNYTVIMNPHFCDLLILLSLIISIVNSLLQCLMILRLSFCTNNELPLFFCELAQVIKLACSDTLINYILIYLATFIFGGIPIFGIIFSYTRIVSSILKISSLRGKYKAFSTCGSHLSVVSLFYGAGVGVYISSSIAVFPQTTTVSYIMYTVLPQMLNPFIYSLRNKDMKEALRKLIAKESRLP

SEQ ID NO: 2547 - protein, 309 aa, Mus musculus
VLLNHTFITEFLLLGVTDIQELNPILFVMVLAMYFINVFGNGAIMMIVILDSRLYSPMYFFLGNLACLDICFSTVTVPKMLENFFSTSKAISFLGCITQLHFFHFLGCTDALLLTVMAFDRFVAICRPLHYPSIMNRQVCIQVAATIWAIPFLHALVHSIMTSQLNFCGSNRIHHFFCDVKPLLELACGNTELNRWLLNTLAGTIGIGLFFLTFLSYFYIVTYLFLKTHSCSMLHKALSTCASHFMVVMIFYAPVLFIYINPDSGSSLEKDRIIAVMYTVVTPALNPLIYALRNKEVRCALNRKLRILI

SEQ ID NO: 2548 - protein, 305 aa, Mus musculus
MRNHSAVHEFVLLGLSTDPHIQPALFVLFLLVYLLTVVGNSLMLLVIVADSHLHTPMYFFLRQLSFLDLCHSSVTAPKMLENLLSEEKTILVESCLAQAFFVFATGGTEACLLAAMAYDRYVAIGSPLLYSQVMSSQLCVGLVWLSWCLAVVDALLNTLPAVSLDFCEDQTISHFSCELSSLFPLSCSDTAANFTLLLCSSVVHFFGTLVMIVCSYGRIVTTVLRVSSSTGRSKAFSTCLSHLTTVILFYGSGFISYLLPASGSPLEKVFSLQYSVITPMLNPLIYSLKNKEVKAALGRMIRKHF

SEQ ID NO: 2549 - protein, 311 aa, Mus musculus
MAWSNHSVITEFVLTGLSDDPLIQALLFALFLGIYVLTMTGNLTMLLVITADSHLHTPMYFFLSNLSFLDLCFSSVTVPKLLKDLLSAKKTISVEGCLAQVFFVFITAGTEAFLLSMMAYDRYAAVCHPLLYGQMMSNELCLKLVLLSWGLASLSSVVIVLLAVNLDFCEAYTIHHYTCELPSLFPLSCSDISINVDILICSTLLHGLGTFLPIFFSYARIVSTVLSMESTTGRSKAFNTCSSHLIAVVLFFGSGLIRYLMPTSGSSLDLLSSLQYSAVTPMLNPLIYSLKNQEVKAAVRRTLGKCLRYLE

SEQ ID NO: 2550 - protein, 316 aa, Mus musculus
MNMTNNTMVTEFTLLGIPETEGLENVLLFLFSTLYACALLGNLLLLTAVTSSPRLHTPMYFFLSNLSISDMGFCSTTAPKMLSYLSGRGGGISFQGCVVQHFFYHCIGCVLCFLYTVMAYDRFVAICFPLRYTIIMNHRVCCVLATGTWMSGCVHATILTCLTFQLPYCGPSEVSYYFCDMPAVLLLACEDSSLAQRVGFTNVGLLSLICFFLIVVSYTRIGISISKIRSTEGRQRAFSTCSAHLTAIMCVYGPVIVIYLQPNPSPLLSAIIQIFNNLVTPTINPLIYSLRNKDVKAALRHVFLKRCLSLEVNENI

SEQ ID NO: 2551 - protein, 315 aa, Mus musculus
LSPENSSTITELVLVGFSDQPQTELPLFVFFSLVYLASCLGNTAVVILVALDVSLQTPMYFFLCHLAFLNGFFGTVVTPKMLFNFLASRKVISYPFCLAQTYLTLFLESTECFLLAVMAIDRYVAICYPLRYLLIMSWAVCIALAVAVWVTGFCASVLPLCFMILPLCGPYVVDYLFCELPILLHLFCADTSLQEAMMAVGGAGTVLVPFLLIALSYLRILVTVIRIDSAEGRKKAFSTCASHLAVVTIYYGTGLIRYLRPKSLYSAEGDKLISVFYAVIGPALNPFIYSLRNKEVQGAVRRVVERYRKSPRIAF

SEQ ID NO: 2552 - protein, 311 aa, Mus musculus
MGNHSTVTTFLLWGFSSFPELHNLLFVVILLSHVTILLANASIMVAIKLNHNLHTPMYFFLFALSFSETCTTMVILPRMLVDLLSESKAISLPECATQMFFFFGLAANNCFIMAAMSYDRYTAIHSPLHYHIFMTPKVCSQLVIASCVVGFLCSLSITFTIFNLSFCDSKTIQHFFCDISPLVHLACDYTAHHAMIIFMVSAFVLVGSFVLIMISYAFIVFLVVKMPSVQGRHKAFSTCSSHLTVVSMHYGFACFVYLIPKNSDSFREDMLMAVTYTVLTPLLNPIVYSLRNKEMQTALRKVLSSINKMLP

SEQ ID NO: 2553 - protein, 323 aa, Mus musculus
MDNTNYSVVSEFVLLGLSSSRELQIFYFVFFSMLYIVIILGNLLIIIAVTSDSSLHSPMYFLLGNLSFFDICQASFATPKMIVDFLSEHKTISFSGCIAQIFFIHLFTGGEMVILVSMAYDRYVAICKPLHYMTIMNQTTCTALVVISWAVGLVHTLSQLSFTVKLSFCGPNEVDSFFCDLPRVVKLACIDSYITEILIVVNSGILSLSTFSLLVSSYVIILVTVWFKSSAAMAKAFSTLAAHIMVVVLFFGPCIFIYVWPFTTYPVDKILAIFYTVFTPILNPIIYTLRNRDMKAVMGKIAAHYLRPPKVAEMSFVARISLY

SEQ ID NO: 2554 - protein, 321 aa, Mus musculus
MATAVHRNGSLTPVSLQAFVLVGFGGGAETQALLFAVFLVLYMVTVLGNLTMIVVITLDARLHSPMYFFLKNLSFVDFCYSSVIAPKAMANFYSSKVIGVAGCAAQLFFFSFLGTSEALLLAVMAYDRFMAICSPLHYPVTMSSTVCACLVLAAYFGGCLNSIVETSLTFQLPFCGSNHIDHFFCDVPPLLQIACANTSVNELVMFAICGFILMGATLVILISYGYITVTILSMHSGSRRHKVFSTCGSHLTAVSLFYGTGIAIYGQPGGLASKEQGKVVSIFYTLVIPLLNPLIYSLRNKDVKDALERLRQRQRQKHAAI

SEQ ID NO: 2555 - protein, 319 aa, Mus musculus
MATAVHRNGSLTPVSLRVFVLVGFGGGALTQALLFAVFLVLYVVTVLGNLTMIVVITLDARLHSPMYFFLKNLSFVDLCYSSAIAPNALANFLSTSKVISFEACATQFFFFSLLATTETFLLAVMAYDRFMAICSPLRYPVTMCPTTCTRLVLGTFCVGCLNSIVQTSLTFQLPFCSSNRIDHFYCDVPPLLQLACASTALNELFLFGLCGFIIVSTTLAVLVSYGYITVTILRMHSGSGRHKVFSTCGSHLTAVSLFYGTLFVMYAQPGALTSMEQGKVVSIFYTLVIPMLNPLIYSLRNKDVKDALQRLGQRHSLVK

SEQ ID NO: 2556 - protein, 313 aa, Mus musculus
MGTVCNDTHGDFILRGFSDKPYLEKVLFGVILVFYCLTLAGNTIIIFVSLKDPKLQIPMYFFLSNLSLLDICFTSSCVPQMLVNLRSPKKTITYSGCATQLYIFLWLGATECVLLVVMAVDRYVAVCHPLRYVTVMHPKVCLQLAVLAWGSGLIQSLIQSTATLRLPFCSQRVVDNIVCEVPALIQLSSADTTYNEVQMSIASVILLVLPLAIILSSYGAIVKSVLKIKSPAGQKKAFGTCTSHLLVVSLFYGTVTGVYLQPKTHYAHEWGKFLTLFYTVITPTLNPLIYTLKNKEVKEAVIRLWWKTWISQR

SEQ ID NO: 2557 - protein, 312 aa, Mus musculus
MAEELWNHSSLSSFILAGLFGHSPYDSFFFSLVLLAFGAAVVGNILLLMVIQVDRRLHTPMYFFLSQLSIMDLTMTCTVVPKMATNFLSGGKLISLGGCASQIFFVVTVGGAECFLLAVMAYDRYMAVCYPLRYPVLMNWKACSFLATASWMGGMADSVIDVGVVFSFPYCGSLEVDHFFCEVPALLRLSCADTSLFEDLIYACCVVMLLLPLGVIVASYARVLTTVMRMPSTEGKQKALTTCSSHLAVVGLYYGGAIFSYMQRASARTPLGDRATSIFYTIVTPMFNPLIYSLRNREVTSALKKMLERWGM

SEQ ID NO: 2558 - protein, 309 aa, Mus musculus
MDSFNATLEERFFLVGFSDWPQLELILFVFISIVYSLTIFGNTTIIALSRIDLRLHTPMYFFLSNLSFLDLCFTTSTVPQLLINLYGQDRTISYGGCVAQLFIYLALGSTECVLLVVMAFDRYAAVCRPLHYTTIMHPLLCQALALASWVGGFLNSLIQTGLMMTMPLCGHRLNHFFCEMPVFLKLACQDTGGTEAKMFVARAIILVFPATLILGSYGHIAKAVLKVKSTAGRRKAFGTCGSHLLVVSLFYGSAIYTYLQPKSSYSESEGKFVALFYTIVTPMLNPLIYTLRNKDVKGALWKVLGRGTD

SEQ ID NO: 2559 - protein, 320 aa, Mus musculus
MTPFEMTNHTRVTEFIFLGFSNHPNLQGVFFLAFLAIYLTTLLGNTLMIVATRVSPALHTPMYYFLSNLSFLDICYTSTSIPVMLVNFFREKKTISFEGCLSQIFFFVSCAGTECVLLAAMAYDRYVAVCHPLRYPVLMSTRVCISLVTGSWLCGLVNSVTHTVLTSTLTLCGPNQISHFLCDVPLLLKLSCSDTSVNESVLHVSSATVGLSPCLFTAGSYILIISAILRIPSTQGKRKAFSTCASHLTVVVVFFGTANFNYVRPKEGYSLDMGILVSVLYCVVTPLFNPIIYSLRNKEVKGALRKLTGVPSLTIAVARE

SEQ ID NO: 2560 - protein, 322 aa, Mus musculus
MWIQLEFMENHKNITEFIFMGLWENRQIELLFFFLFLLCYLAVLMGNSVIFLTITCSHLIEQPMYYFLCHLSLMDLCYPSTVIPRLIRDLAATRKNISYNECMTQLFTAHLLAGVEIFILVSMALDRYVAIVKPLHYMVIMSRKRCDMLIVTAWILGFWHSIALLLMVLSLPFCGPNHINHYFCDIKPLLKLVCKDVHVVSILAIVNSGMVLFAIFIVLLASYILILYSLRTRSSAGKWKVLSTCSSHIMVVVLFFGPCIYTYVLPAGSENKDKEISVFYTVIAPILNPVIYTLRNSEMKSAMHKVWSRLSNLGLKYVKPSC

SEQ ID NO: 2561 - protein, 312 aa, Mus musculus
MDKANHSVVSEFVFLGLSNRWGIQLLLFLFSSMFYIASVMGNLLIVFSVTADSNLHSPMYFLLANLSFLDLGVCSIAAPKMIFDLFRKHKAISFGGCITQIFFIHAIGGTEMVLLIAMAFDRYVAICKPLHYLTIMRPQICILILAVSWVLGLIHSVAQLAFVVDLPFCGPNILDSFYCDLPQLIKLACTETSKLVFMVTANSGLISVGSFFILIISYIFILVTVRKHSSGSIAKALSTLSAHVTVVVLFFGPLIFFYTWPFPSSHLDKFLAIFDAVLTPFLNPVIYTFRNKEMKAAMRKLCSQLVNYRKVS

SEQ ID NO: 2562 - protein, 298 aa, Mus musculus
SKLFLFVFSSMFYVASMTGNSLIVFTVASDPHLHSPMYFLLANLSFIDLGVSSVIAPKMIYDLFRKHKVISFRGCVTQIFFIHFIGGVEMVLLIAMAFDRYVAICKPLHYLIIMRPRMCILFIVASWVVGFMHSLVQLAFVVNLPFCGPNVLDSFYCDFPRFIKLACIDTYRLKLLVLVNSGFMSVGSFFILIISYVVIIFIVHKHSSSGSSKALSTLSAHVMVVVLFFGPVMFIYTWPSSLTHLDKFLPIFDAIVTPFLNPVIYTFRNQEMKMAMMRVLRQIMGYRQIIKHLHPDQS

SEQ ID NO: 2563 - protein, 290 aa, Mus musculus
NIQLLLFLLSSVLYVASMMGNCLIIFTVASDPQLHSPMYFLLSNLSFIDIGISSATSPKMIYDLFKKNKVISFRGCIIQIFFIHAIGGVEMVLLIAMAFDRYVAICKPLHYLTMMSPQMCIFFLITAWVVGLMHSVIQLVFIVNLPLCGQLLDSFYCDLPQFIKLACMDTYRLELMVSISSGFMSVAFFFILIISYVVIIFTVLKHSSSGSYKALSTLSAHVTVVVLFFGPAIFFYTWPSSSTHLDKFLALFDAVVTPFLNPVIYTLRNQEMKMAMRRVFRHLMGYRQIS

SEQ ID NO: 2564 - protein, 310 aa, Mus musculus
MTENQTWIPEFTLQGFLLSPRMQMLLCGLFSLLYTFTLLGNGVILGLIWLDCRLHTPMYFFLSHLAIVDISYATNNVPKMLANLLAKKKSISFAPCIMQTFLYMAFAHTECLILVMMSYDRYAAICQPLQYSVIMSWKVCTIMAVASWACGSLLALVHVVLILRLPFCGLHEINHFFCEILSVLKLVCADTTLNQIVIFAGSVFILVGPLCFVLVSYTRILIAILKIQSGEGRRKAFSTCSSHLCVVGLFFGSAIVMYMAPKSQHPETQQKVLSLFYSLFNPMLNPLIYSLRNAEVKGAVKRVLWKQRSR

SEQ ID NO: 2565 - protein, 308 aa, Mus musculus
MATGNHSAAVVFVLVGLTQQPELLLPLFILFLGIYVVTAVGNLGMILLITVSPLLHTPMYYFLSSLSFVDLSYSTVITPKMLVNFLGKKNFITYSECMAQFFFFAVFVVTEGYLLTVMAYDHYVAICRPLLYNVMMSSKHCLLLVLVAFTLGLFSAVVHTSAMMSLNFCKTYIISHYFCDALPLLKLSCSNTHLNELLIFIIGGINTLVPTLAVAISYVFIFCSIRHIKSSKSRSKAFGTCSSHLMAVGIFFGSITFMYLKPSSSNSLEQEKVSSVFYTTVIPMLNPLIYSLRNKDVKKALGRFSVRR

SEQ ID NO: 2566 - protein, 318 aa, Mus musculus
MRRNRNTSLDDVVTDFLLLGLAHPPNLRAFLFLVFFLIYILTQLGNLLILLTVWADPKLHARPMYILLGVLSFLDMWLSSVIVPRIILNFTPASKVIAFGGCAAQLYFFHFLGSTQCFLYTLMAYDRYLAICQPLRYPVLMNGKLCTILVSGAWVAGSIHGSIQATLTFRLPYCGPKEVDYFFCDIPAVLRLACADTTVNELVTFVDIGVVAASCFMLILLSYANIVHAILKIRTADGRKRAFSTCGSHLTVVTVYYVPCIFIYLRAGSKSPFDGAVAVFYTVVTPLLNPLIYTLRNQEVKSALKRLRAGRRDVDGEK

SEQ ID NO: 2567 - protein, 311 aa, Mus musculus
MEKNNESSGEFILLGFSDQPRLEMVLFVVCTVFYFLAVTGNSAIIFLSLMDLRLHTPMYFFLSNLSLLDLCYSTSSIPQFQINLWGPRKTISFVGCAVQLFAFLSVGGIECILLSVMAYDRFVAVCKPLHYLTIMHPQLCLKLAAFAWLGGTASSTLMSPLTMSLGRCGHRRINHFVCEMPAIIHISCVDTSWIEGLIFILAIPIVLVPLIMILVSYGYIAAAVLRIKSTASRRKAFNTCSSHMAVVSLFYSSIIYMYMQPGNLASQDQGKFLTLFYCLVTPTLNPFIYSLRNKDMKAAMLKVLGKDRNLL

SEQ ID NO: 2568 - protein, 309 aa, Mus musculus
MALANVSSVKEFILLGLTQQPELQLPLFFLFLGIYVVSVMGNLGLIVLIVLNPHLHTPMYYFLFNLSFTDLCYSSAITPRMLVGFVKQNIISHAECLTQLFFFAFFVIDECYILTAMAYDRYAAICKPLLYQVTMSHQVCLLMTMGVYVMGFAGALSHIVCMLRLTFCDGNIINNYVCDVHPLLKLSCSSTSINELVLFIVVGVNITVPSLTLFVSYTLILSNILSIHSGEGRSKAFSTCGSHVIAVSFFFGAAAFMYLKPSSASVDEDKVSTIFYTILGPMLNPFIYSIRNKDVHIALKKTLKKKILT

SEQ ID NO: 2569 - protein, 322 aa, Mus musculus
KSSAAPSNSSTITGFILLGFPCPREGQILLFVLFSIVYLLTLMGNASIICAVYCDQKLHIPMYLLLANFSFLEIWYVTSTVPNMLANFLSDTKVISFSGCFLQFYFFFSLGSTECFFLAVMAFDRYLAICRPLHYPALMTGRLCNILVISCWILGFLWFPVPIIIISQVSFCGSRIIDHFLCDPGPLLALTCKKSPLIELVFSILSPLPLIIPFVFIMGSYTLVLAAVLKVPSASGKRKAFSTCGSHLAVVALFYGSVLVMYGSPTSEHEAGMQKIVTLFYSVLTPLLNPVIYSLRNKHMKIALKEILRKIKNWSTKKALGN

SEQ ID NO: 2570 - protein, 322 aa, Mus musculus
MAPENQTTVLEFHLMGLSEDPDLQTILFGLFLSMYLVTVFGNLLIILAIISDSHLHTPMYFFLCNLSLVDIFFCSTTVPKMLVNIQTQSRAISFTGCLVQMYAFHLFGTIDSFLLAVMAIDRLVAIAYPLRYSVLMSPHVCALLVGGTWVITNLQSLVHTCLMAQLTFCARSEIPHFFCDLMPLLKLSCSDTHINELVIFAFGIVMGLSPLSCILVSYICIFRAVFRIPSAQGKWKAFSTCGSHLTVVSLFYGTIFTGYLLPASPSSSQKDKAAALMFGVVIPTLNPFIYSLRNKDMKAALGSLAAKQSHSSPSAEQELCGH

SEQ ID NO: 2571 - protein, 321 aa, Mus musculus
MGPGTLNDSGTTEFLLLGLWAPPSLRPLLWASLLLAYLTTVLGNGALVGLIALDRRLHRPMYRLLTHLALLDTAYVSTTLPQALAHMTMRSARLSLVRCGTQLYVGISLGSCEAILLAAMALDRCLAVCRPLHYATLVTAPRCAALAGASWTLGFALSVPNAVAALRLPFCPGRAAVDHFFCELPAVLRTACADTTANYRLVYGLGVPILLVPLVLILASYTWILAAVRKLPSAGSRHKALSTCSSHLAVVGLFYGTVSAMYLRPKASSDLPARHHKLVAVFYLVVTPVLNPLIYSLRNREVHMAARYALARLRGTRIVLH

SEQ ID NO: 2572 - protein, 314 aa, Mus musculus
MECVNDTVVREFVFLGFSSLAELQLLLFAVFLSLYLFTLSTNAVIVSTIVLDRALHTPMYFFLSVLSCSETCYTFVIVPKMLVDLLARKKSISFLGCAIQMFTFLFLGCSHSFLLAAMGYDRYVAICHPLRYTVLMGHRVCVGLVAAACVCGFTVAQVITSQVFRLPFRSSNQLHHFFCDISPVLQLASHHPHSTQITIFLLCALVLVIPLLLILVSYIHIISAILQFPSTLGRYKAFSTCASHLIVVIVHYGCASFIYLRPKSSYSSSQDALISVSYTILTPLFNPVIYSLRNKDFKSALHRVIGRTVTLRQH

SEQ ID NO: 2573 - protein, 231 aa, Mus musculus
SVTPKMLMKFLNKNDMISVGECFAQYYFFCFSATTEIFLLVAMAYDRYVAICNPLLYLVVMSKRLCTVFISLSYIIGVLNPIVHVGLLFRLTFCKSNVIDHFYCEILPLYTISCTDASLNALVIFIFASSIQISTSVTIIVSYARVLFSVLNMKSEKGRRKAFFTCSAHLLSVSLFYGTLLFMYVSHGSAPGENQDKMYSLFYTVVIPLLNPFIYSLRNKEVLCALRKVVK

SEQ ID NO: 2574 - protein, 281 aa, Mus musculus
  VARIANT (154)...(208): Any amino acid
MGQSNNVTEFVLLGFTQDPAGQKALFVMFSLMYIATMVGNLLIVGTVIASPSLGSPMYFFLASLSLMDAVYSTAISPKLIVDLLREKKTISFRACISQLFIEHLFGGVDIVILVAMAYDRYVAICKPLHYLIIMNRRVCILFLVMAWVGGFVHXXXXXXXXXXXXXXXXXXXXXXXXXXXXXXXXXXXXXXXXXXXXXXXXXXHXXXXFLFFVPCIFMYVRPVSSFPIDKSITVIYTIVTPMLNPLIYTLRNSEMKNSMEKLLQKMLSPNRIKLSSCCSYD

SEQ ID NO: 2575 - protein, 253 aa, Mus musculus
  VARIANT (108)...(127): Any amino acid
MLHVNITNTIFSTFLVTGIPGLEAVYIWIAIPFCAMFLITMVGNMTIIIVIWHEQTLHVPMYLFLAMLASSDLGLSLFTFPTLLRIFLLNDRELTTTACFTQMFFIHXXXXXXXXXXXXXXXXXXXXEGHKWCQIQDSLDLELGMVVSQAMVLTEAWVFYKSNTSLLNHLYNRHSCKFVSTGYISLLFSREILHQFSYQFLIIIQLPIYLIDINIKCNNSLVFIVLSCVLTKVVQSHATLIEVVMEEGKDLPN

SEQ ID NO: 2576 - protein, 97 aa, Mus musculus
MEKYNLTMVTEFILVGITYHPEFQVPLFGLFLIIYLTSLFGNLGMIILTMVDSGLQTPMYFFLRHLATTDLGYSTAVGPKMLRNFTCNQNTISFNAC

SEQ ID NO: 2577 - protein, 163 aa, Mus musculus
LQSSVHVALAFCLSFCHSNVINHFFCDIPPLLDISCSDTHTNEITLLVLATLDVVFTLLVILNTYLLIFIAILRMRSAEAQRKAFSTCASHLITVSIFFGSLIFMYLQPSFNHSMDTDKIASVFYTMVIPMLNPVVYSLRNKEVKNAFKKVVEKLMSSFHLVD

SEQ ID NO: 2578 - protein, 124 aa, Mus musculus
SLLCFTKSFLGALVLMQLALHPRGAVLQFQKTLLTTVDKNRWMSSAAGRKKAFSTCASHLTAVTIFYGTLAYMYLHPHTNDSQEQEKAASVFYGIIIPMLNPLIYSLRNQDVIEAFKKIAKKCL

SEQ ID NO: 2579 - protein, 262 aa, Mus musculus
RLPLVGWPFLLCFCQPMSIGDVSIFVLFNKEMNIPMYFLSILPTLDMDYVSVTVPNTCINTLSDHRNISVGGCAAQIFLLYICTCVEIHFFTTMAQDHYVAICKPLLYSVIMNHRLCVQMTLASLLSSLVLAIVHTFKIFQLSFCYSSMVPQFFCDIPFAEVSCSDTFNNKLLILLSATVVSGSYFVFLVISYAHRLSNVLKFPVKREIGKAFSTFVLHFIVVSVFLCSGAYVYLSTLGTIVTLEVKEMILSVFYTIATPFF

SEQ ID NO: 2580 - protein, 194 aa, Mus musculus
FFPNMWVAVSYYWQCPLSYRYVPICYPLRYMSIKSLNLYVLLVVISWAFPSANALVHILLLARLSHFRHNTIPHIFKRSALLNLSSSETIINELVILPLGTVIILVTYGLIRVTILRTLPIKGICKALSTCDSHLSVSLYYGAIIGLYLVPSSNNINDKDVNVSAIYNVVIPMINTLIYSLRNWDIILSEVTQT

SEQ ID NO: 2581 - protein, 188 aa, Mus musculus
SNPASTLIYSTQMNHIIQRILVASSWVCSFSSVLTHTVAISTLHFCGLNVVNNFYCDLPQLFQLSCSTTQLNELLLFAVGFLMTETSMALIFTFYIYGAVAILQIRSAEGRKAFSTYSSHLTVVAIFYGTGIFAYMSLRSIKLSDNDKAIGIFNTVINPMLNPLIYSLRNPDVQAALWKVLTGKQLSH

SEQ ID NO: 2582 - protein, 331 aa, Mus musculus
FFKFTTSTDEDLFKQEKLNASTLMEFTLLGFSNVPHLQWVLFMVFLFMYMTILLCNSIIIVLAKTDPALQTPMYFFLSNFSFLEICYVTATIPRMLMDLYTLKGNISVFACATQMYFVLMLGATECLLLAAMAYDRYVAICHPLQYSLLMKNKVCLQLVAASWISGIPVEIGQTYQIFSLHFCASNRIDHFFCDIPPLLKLACGDTFMNTVAVYVVAVVFVMVPFLLIIVSYIKIICNIMKLSSAKGMAKAFSTCSSHLIVVILFYGTASITYLQPKQSQSEGMGKMLSLFYTILIPALNPIIYSLREQRYHDGLLRKLHSKLLIWWENVK

SEQ ID NO: 2583 - protein, 297 aa, Mus musculus
MGQSNNVTEFVLLGFTQDPAGQKALFVMFSLMYIATMVGNLLIVGTVIASPSLGSPMYFFLASLSLMDAVYSTAISPKLIVDLLREKKTISFRACISQLFIEHLFGGVDIVILVAMAYDRYVAICKPLHYLIIMNRRVCILFLVMAWVGGFVHALFQVLAVYNLPFCGPNIIDHFGCDIYPLLLLACTDTYFIGLSVIGNNGAMCIVIFILLLLSYGIILRSLKNHSQEGRRKALSTCGSHITVVFLFFVPCIFMYVRPVSSFPIDKFITVIYTIVTPMLNPLIYTLRNSEMKNSRK

SEQ ID NO: 2584 - protein, 316 aa, Mus musculus
SQTADPKNSSSTVTEFILVGFEQSSPSTRALLFTLFLALYSLAMAMNGLIIFITWTDPRLNSPMYFFLGHLSFLDVCFITTTIPQMLVHLVTKNHTVSFVSCMTQMYLVFLVGVAECILLAFMAYDRYVAICHPLNYAQIMSQKVCVRLVCSSWIFGMVNGIFLEYISFRNPFCKDNHIENFFCEAPIVIALSCGDLKFTMKLIFVDAIVVLLSPMVLIITSYARILASILHRASSSSHRKTFSTCASHLTVVIFLYTSAMFSYMNPRSTHGPDKDKSFSLLYTIIMPMCNPVIYSFRNKEMKGAMGRALGRGSLA

SEQ ID NO: 2585 - protein, 318 aa, Mus musculus
EANDSVVKEFIFIGLSDSQGLQIFLFAFFLIFYVGIVFGNLLIVMTVTYDSHLHSPMYFLLANLSFIDLCLSSVTAPKMIADFFRKHKVISVHGCFAQIFLLHFFGGSELVTLIAMAFDRYVAICKPLRYTIIMRGNVCAGIVATAWATGFLHSVSQLAFAVNLPFCGPNKVDSFYCDLPRVIKLACADTYRLDIMVIANSGVLTVCSFVLLIISYSIILTTIQRRPSDRSSKALSTLTAHITVVLLFFGPCIFIYAWPFPIKSLDKFLAVFYSVVTPLLNPIIYTLRNTEMKTAMRRPETMEFKLLGELIDLLWPRD

SEQ ID NO: 2586 - protein, 310 aa, Mus musculus
MGATNDSTFSHFILTGFSDRPELERVLFAILLPAYLLTLLGNSTIILVSRLDPHLHTPMYFFLTHLSFLDLSFTSSSIPQLLYNLSGPDKTISYVGCALQLVLFLGLGGVECLLLAVMAYDRFVAICKPLHYMVIMSPRLCVGLVSVAWSCGVANSLAMSPATLSLPRCGHHRVDHFLCEMPALIRMACVNTAAVEGTVFVLAIGIVLSPLVFILVSYGYIVRAVLQIRSAAGRQKAFNTCGSHLTVVSLFYGNIIYMYMQPGNSSSQDQGKFLTLFYNIVTPLLNPLIYTLRNKEVKGALRRLLLGSRE

SEQ ID NO: 2587 - protein, 316 aa, Mus musculus
MSNSELMKNGSLSLCTEFTLVAFSSLAELQLVLFVVFLVLYLFTVGGNLTIICVIWTTPSLHTPMYFFLANLSFLEMCYISSVVPQMLVHLLVQLKTISVAGCAAQMYVFTILGLTECCLLATMAYDRFVAICYPLHYTLWMDPSVCLKLAGASWMTGILVESAQTTWIFTLPFCGAGTIQHFFCDIMPVVKLACVDTSQNEMVIFIISLIFIMSPCLFILCSYVRIILTILKMPSAAGRHKAFSTCSSHILVVSLFYGTALFTYLQPKSSHTPDTDKVTALMYTVVTPALNPVIYTLRNKEVKEAFQKVTQKETS

SEQ ID NO: 2588 - protein, 311 aa, Mus musculus
MGGKNQTDVSHFFLLGLTDDPTVKPVIFCIFLLMYMVTILGNLLIILAVCSYSHLQTPMYFFISNLSINDICLSTTVIPNMLRTTQTQDQSISYAGCLTQLCFVLLFAGFESCLLAAMAYDRYVAICYPLSYTVMMNFHSCALLILFSVLISVLNMGLLGLMVLRLSFCTNLEIPLFFCELSQVMKLACSDTLINDILIYLATFIFGGIPISGIIFSYVQIASSVLRISSVKGRCKAFSTCGSHLSVTSLSYGSGLWVYITSSVAILPKKTSVACIMYTVVPQMLNPFIFSLRNKDMKGTMKKFISKVASL

SEQ ID NO: 2589 - protein, 310 aa, Mus musculus
MSSFNTTLKGGFILMGFSDWPQLEHIFFVFISMFYILTIFGNFTIITISRMDQRLQTPMYFFLNNLSFLDLCYNTSIVPQLLVNISGIDKTMSYAGCMTQFFIVLLLGGTECMLLVVMAFDRYVAVCHPLHYTSIMHPLLCHALAISSWVGGLVNSLTQTSLIMTIPLCGHHLNHFFCEMLVLLKLACEDTVGTEANLFVAGAIILVCPVALILGTYAHIAHAVLKIKSRSGRRKALGTCGSHLTGVFLFYGSAMYMYLQPVHVYSGSEGKFAALFYTIITPMMNPIYTLKNKNVKGALCKVLGRDTSTT

SEQ ID NO: 2590 - protein, 316 aa, Mus musculus
MAVMLGLNYTFVSEFILIGFSTFPHLQLMFFLLFLLMYLFTLLGNLLIMTTIWSEHSLHTPMYLFLCALSISEIFYTFAIIPRMLADLLTTLHSIAFLACASQMFFSFTFGFTHSFLLTVMGYDRYVAICHPLRYNVLMSPRGCACLVAWSWVGGSFMGTVVTTAIFNLTFCGPNEIHHFTCHVPPLLKLACGENVLEVAKGVEIVCITALLGCFLLILLSYAFIVVTILKIPSAEGRHKAFSTCASHLTVVVVHYGFASVIYLKPKGPKSLEGDTLMGITYTVLTPFLSPIIFSLRNKELKNAMEESFPQQIIST

SEQ ID NO: 2591 - protein, 323 aa, Mus musculus
MLHVNITNTIFSTFLVTGIPGLEAVYIWIAIPFCAMFLITMVGNMTIIIVIWHEQTLHVPMYLFLAMLASSDLGLSLFTFPTLLRIFLLNDRELTTTACFTQMFFIHTFQDLESAIILAMAFDRYVAISHPLHYHSILTDTVIAKIGLAIVVRTLTVQVPLPILLKRLYFCHSNVLSHSYCLHPDIIKLSCSSTTVNSIFGLFVVLSTMGLDFLLILLSYALILKTVLNMASHSGRLKALNTCISHLCAVVLFFTPMICLSMLHRFGPRLPSHVYVTLANMHFLIPPVMNPIVYVVKTKQIRDKIQKLFIRKATKKAQAASIT

SEQ ID NO: 2592 - protein, 300 aa, Mus musculus
MEKTNHSLTTQFILVGFSDHPDLKTPLFLLFSVIYLVTMVGNLGLVAVIYLEPRLHTPMYIFLGNLALMDSCCSCAITPKILENFFSVDRRISLYECMAQFYFLCLAETADCFLLAAMAYDRYVAICNPLQYHSMMSKKLSIQMSIGTFITSNLHSLIHVGCLLRLTFCKSNRIDHFFCDILPLYRLSCTDPFINELMIYIFSMPIQVFTITTVLVSYFCILLTIFKMKSKDGRGKAFSTCASHFFSVSIFYACLLMYIRPFDDSNKDIPVAIFYTIIIPLLNPFIYSLRNTEVVNALRK

SEQ ID NO: 2593 - protein, 10 aa, Mus musculus
MAYDRYVAIC

SEQ ID NO: 2594 - protein, 7 aa, Mus musculus
FSTCSSH

SEQ ID NO: 2595 - protein, 6 aa, Mus musculus
MAYDRY

SEQ ID NO: 2596 - protein, 6 aa, Mus musculus
MAFDRY

1. A nucleic acid molecule comprising a nucleotide sequence selected from the group consisting of SEQ ID NOS: 4-6, 8, 12-14, 16-27, 30-50, 52, 53, 55-69, 72-86, 88-92, 97-100, 102-121, 123, 125, 127-144, 146-152, 154-164, 167, 168, 171-173, 175-182, 184-191, 193, 194, 196-205, 207, 209-214, 216-219, 221-225, 227-245, 250-252, 254, 256-260, 264-270, 273-281, 285-292, 294, 296-300, 303, 304, 306-313, 315-318, 320, 322-329, 331-335, 339-352, 354, 355, 357-388, 391, 393-426, 428, 429, 432-468, 470-486, 488-495, 497-507, 509-513, 515-525, 527, 528, 532, 533, 535, 538, 540-542, 545-556, 558-563, 565-576, 578-597, 599-618, 620, 624-628, 630, 631, 637-656, 659-662, 665, 667-675, 677-683, 685-697, 701, 704-716, 719-738, 740-757, 759-766, 768-784, 786, 789-796, 800, 801, 803-812, 814-834, 836-865, 867-926, 928-1060, 1062-1094, 1096-1115, 1117-1126, 1129-1135, 1138-1144, 1146-1156, 1159-1165, 1168-1171, 1173-1175, 1177-1192, 1194-1196, 1198-1201, 1203, 1205-1227, 1229, 1232-1250, 1252, 1253, 1255-1258, 1260-1268, 1270-1272, 1274-1293, 1295 and 1296.

2. The nucleic acid molecule of claim 1, wherein said nucleic acid molecule is selected from the group consisting of RNA and DNA.

3. A vector comprising a nucleotide sequence selected from the group consisting of SEQ ID NOS: 4-6, 8, 12-14, 16-27, 30-50, 52, 53, 55-69, 72-86, 88-92, 97-100, 102-121, 123, 125, 127-144, 146-152, 154-164, 167, 168, 171-173, 175-182, 184-191, 193, 194, 196-205, 207, 209-214, 216-219, 221-225, 227-245, 250-252, 254, 256-260, 264-270, 273-281, 285-292, 294, 296-300, 303, 304, 306-313, 315-318, 320, 322-329, 331-335, 339-352, 354, 355, 357-388, 391, 393-426, 428, 429, 432-468, 470-486, 488-495, 497-507, 509-513, 515-525, 527, 528, 532, 533, 535, 538, 540-542, 545-556, 558-563, 565-576, 578-597, 599-618, 620, 624-628, 630, 631, 637-656, 659-662, 665, 667-675, 677-683, 685-697, 701, 704-716, 719-738, 740-757, 759-766, 768-784, 786, 789-796, 800, 801, 803-812, 814-834, 836-865, 867-926, 928-1060, 1062-1094, 1096-1115, 1117-1126, 1129-1135, 1138-1144, 1146-1156, 1159-1165, 1168-1171, 1173-1175, 1177-1192, 1194-1196, 1198-1201, 1203, 1205-1227, 1229, 1232-1250, 1252, 1253, 1255-1258, 1260-1268, 1270-1272, 1274-1293, 1295 and 1296.

4. The vector of claim 3 wherein the vector is selected from the group consisting of a virus and a plasmid.

5. The vector of claim 4 wherein the nucleotide sequence is operably linked to a promoter sequence.

6. A host cell transformed with an expression vector comprising a nucleotide sequence selected from the group consisting of SEQ ID NOS: 4-6, 8, 12-14, 16-27, 30-50, 52, 53, 55-69, 72-86, 88-92, 97-100, 102-121, 123, 125, 127-144, 146-152, 154-164, 167, 168, 171-173, 175-182, 184-191, 193, 194, 196-205, 207, 209-214, 216-219, 221-225, 227-245, 250-252, 254, 256-260, 264-270, 273-281, 285-292, 294, 296-300, 303, 304, 306-313, 315-318, 320, 322-329, 331-335, 339-352, 354, 355, 357-388, 391, 393-426, 428, 429, 432-468, 470-486, 488-495, 497-507, 509-513, 515-525, 527, 528, 532, 533, 535, 538, 540-542, 545-556, 558-563, 565-576, 578-597, 599-618, 620, 624-628, 630, 631, 637-656, 659-662, 665, 667-675, 677-683, 685-697, 701, 704-716, 719-738, 740-757, 759-766, 768-784, 786, 789-796, 800, 801, 803-812, 814-834, 836-865, 867-926, 928-1060, 1062-1094, 1096-1115, 1117-1126, 1129-1135, 1138-1144, 1146-1156, 1159-1165, 1168-1171, 1173-1175, 1177-1192, 1194-1196, 1198-1201, 1203, 1205-1227, 1229, 1232-1250, 1252, 1253, 1255-1258, 1260-1268, 1270-1272, 1274-1293, 1295 and 1296.

7. A polypeptide encoded by a nucleotide sequence selected from the group consisting of SEQ ID NOS: 4-6, 8, 12-14, 16-27, 30-50, 52, 53, 55-69, 72-86, 88-92, 97-100, 102-121, 123, 125, 127-144, 146-152, 154-164, 167, 168, 171-173, 175-182, 184-191, 193, 194, 196-205, 207, 209-214, 216-219, 221-225, 227-245, 250-252, 254, 256-260, 264-270, 273-281, 285-292, 294, 296-300, 303, 304, 306-313, 315-318, 320, 322-329, 331-335, 339-352, 354, 355, 357-388, 391, 393-426, 428, 429, 432-468, 470-486, 488-495, 497-507, 509-513, 515-525, 527, 528, 532, 533, 535, 538, 540-542, 545-556, 558-563, 565-576, 578-597, 599-618, 620, 624-628, 630, 631, 637-656, 659-662, 665, 667-675, 677-683, 685-697, 701, 704-716, 719-738, 740-757, 759-766, 768-784, 786, 789-796, 800, 801, 803-812, 814-834, 836-865, 867-926, 928-1060, 1062-1094, 1096-1115, 1117-1126, 1129-1135, 1138-1144, 1146-1156, 1159-1165, 1168-1171, 1173-1175, 1177-1192, 1194-1196, 1198-1201, 1203, 1205-1227, 1229, 1232-1250, 1252, 1253, 1255-1258, 1260-1268, 1270-1272, 1274-1293, 1295 and 1296.

8. A polypeptide comprising an amino acid sequence selected from the group consisting of SEQ ID NOS: 1300-1302, 1302, 1308-1310, 1312-1323, 1326-1346, 1348, 1349, 1351-1365, 1368-1382, 1384-1388, 1393-1396, 1398-1417, 1419, 1421, 1423-1440, 1442-1448, 1450-1460, 1463, 1464, 1467-1469, 1471-1478, 1480-1487, 1489, 1490, 1492-1501, 1503, 1505-1510, 1512-1515, 1517-1521, 1523-1541, 1546-1548, 1550, 1552-1556, 1560-1566, 1569-1577, 1581-1588, 1590, 1592-1596, 1599, 1600, 1602-1609, 1611-1614, 1616, 1618-1625, 1627-1631, 1635-1648, 1650, 1651, 1653-1684, 1687, 1689-1722, 1724, 1725, 1728-1764, 1766-1782, 1784-1791, 1793-1803, 1805-1809, 1811-1821, 1823, 1824, 1828, 1829, 1831, 1834, 1836-1838, 1841-1852, 1854-1859, 1861-1872, 1874-1893, 1895-1914, 1916, 1920-1924, 1926, 1927, 1933-1952, 1955-1958, 1961, 1963-1971, 1973-1979, 1981-1993, 1997, 2000-2012, 2015-2034, 2036-2053, 2055-2062, 2064-2080, 2082, 2085-2092, 2096, 2097, 2099-2108, 2110-2130, 2132-2161, 2163-2222, 2224-2356, 2358-2390, 2392-2411, 2413-2422, 2425-2431, 2434-2440, 2442-2452, 2455-2461, 2464-2467, 2469-2471, 2473-2488, 2490-2492, 2494-2497, 2499, 2501-2523, 2525, 2528-2546, 2548, 2549, 2551-2554, 2556-2564, 2568-2570, 2572-2589, 2591 and 2592.

9. An isolated antibody that is capable of binding to a polypeptide encoded by nucleotide sequence selected from the group consisting of SEQ ID NOS: 4-6, 8, 12-14, 16-27, 30-50, 52, 53, 55-69, 72-86, 88-92, 97-100, 102-121, 123, 125, 127-144, 146-152, 154-164, 167, 168, 171-173, 175-182, 184-191, 193, 194, 196-205, 207, 209-214, 216-219, 221-225, 227-245, 250-252, 254, 256-260, 264-270, 273-281, 285-292, 294, 296-300, 303, 304, 306-313, 315-318, 320, 322-329, 331-335, 339-352, 354, 355, 357-388, 391, 393-426, 428, 429, 432-468, 470-486, 488-495, 497-507, 509-513, 515-525, 527, 528, 532, 533, 535, 538, 540-542, 545-556, 558-563, 565-576, 578-597, 599-618, 620, 624-628, 630, 631, 637-656, 659-662, 665, 667-675, 677-683, 685-697, 701, 704-716, 719-738, 740-757, 759-766, 768-784, 786, 789-796, 800, 801, 803-812, 814-834, 836-865, 867-926, 928-1060, 1062-1094, 1096-1115, 1117-1126, 1129-1135, 1138-1144, 1146-1156, 1159-1165, 1168-1171, 1173-1175, 1177-1192, 1194-1196, 1198-1201, 1203, 1205-1227, 1229, 1232-1250, 1252, 1253, 1255-1258, 1260-1268, 1270-1272, 1274-1293, 1295 and 1296.

10. A method for identifying compounds useful for treating anosmia comprising (a) identifying a candidate compound by its ability to bind to a polypeptide encoded by nucleotide sequence selected from the group consisting of SEQ ID NOS: 4-6, 8, 12-14, 16-27, 30-50, 52, 53, 55-69, 72-86, 88-92, 97-100, 102-121, 123, 125, 127-144, 146-152, 154-164, 167, 168, 171-173, 175-182, 184-191, 193, 194, 196-205, 207, 209-214, 216-219, 221-225, 227-245, 250-252, 254, 256-260, 264-270, 273-281, 285-292, 294, 296-300, 303, 304, 306-313, 315-318, 320, 322-329, 331-335, 339-352, 354, 355, 357-388, 391, 393-426, 428, 429, 432-468, 470-486, 488-495, 497-507, 509-513, 515-525, 527, 528, 532, 533, 535, 538, 540-542, 545-556, 558-563, 565-576, 578-597, 599-618, 620, 624-628, 630, 631, 637-656, 659-662, 665, 667-675, 677-683, 685-697, 701, 704-716, 719-738, 740-757, 759-766, 768-784, 786, 789-796, 800, 801, 803-812, 814-834, 836-865, 867-926, 928-1060, 1062-1094, 1096-1115, 1117-1126, 1129-1135, 1138-1144, 1146-1156, 1159-1165, 1168-1171, 1173-1175, 1177-1192, 1194-1196, 1198-1201, 1203, 1205-1227, 1229, 1232-1250, 1252, 1253, 1255-1258, 1260-1268, 1270-1272, 1274-1293, 1295 and 1296; (b) introducing the candidate compound to an anosmic mouse; and (c) determining whether the mouse detects isovaleric acid at a concentration less than 10⁻⁵ M after the candidate compound has been introduced, wherein the ability of the mouse to detect isovaleric acid at a concentration less than 10⁻⁵ M indicates that the compound is useful for the treatment of anosmia.

11. A method for identifying a compound for pest control comprising (a) identifying a candidate compound by its ability to bind to a polypeptide encoded by nucleotide sequence selected from the group consisting of SEQ ID NOS: 4-6, 8, 12-14, 16-27, 30-50, 52, 53, 55-69, 72-86, 88-92, 97-100, 102-121, 123, 125, 127-144, 146-152, 154-164, 167, 168, 171-173, 175-182, 184-191, 193, 194, 196-205, 207, 209-214, 216-219, 221-225, 227-245, 250-252, 254, 256-260, 264-270, 273-281, 285-292, 294, 296-300, 303, 304, 306-313, 315-318, 320, 322-329, 331-335, 339-352, 354, 355, 357-388, 391,.393-426, 428, 429, 432-468, 470-486, 488-495, 497-507, 509-513, 515-525, 527, 528, 532, 533, 535, 538, 540-542, 545-556, 558-563, 565-576, 578-597, 599-618, 620, 624-628, 630, 631, 637-656, 659-662, 665, 667-675, 677-683, 685-697, 701, 704-716, 719-738, 740-757, 759-766, 768-784, 786, 789-796, 800, 801, 803-812, 814-834, 836-865, 867-926,928-1060, 1062-1094, 1096-1115, 1117-1126, 1129-1135, 1138-1144, 1146-1156, 1159-1165, 1168-1171, 1173-1175, 1177-1192, 1194-1196, 1198-1201, 1203, 1205-1227, 1229, 1232-1250, 1252, 1253, 1255-1258, 1260-1268, 1270-1272, 1274-1293, 1295 and 1296; (b) introducing the candidate compound in the vicinity of an animal; and (c) examining the behavior of the animal to determine whether the animal moves towards the candidate compound wherein the movement towards the candidate compound indicates that the candidate compound attract pests.

12. A method for identifying a compound for pest control comprising (a) identifying a candidate compound by its ability to bind to a polypeptide encoded by nucleotide sequence selected from the group consisting of SEQ ID NOS: 4-6, 8, 12-14, 16-27, 30-50, 52, 53, 55-69, 72-86, 88-92, 97-100, 102-121, 123, 125, 127-144, 146-152, 154-164, 167, 168, 171-173, 175-182, 184-191, 193, 194, 196-205, 207, 209-214, 216-219, 221-225, 227-245, 250-252, 254, 256-260, 264-270, 273-281, 285-292, 294, 296-300, 303, 304, 306-313, 315-318, 320, 322-329, 331-335, 339-352, 354, 355, 357-388, 391, 393-426, 428, 429, 432-468, 470-486, 488-495, 497-507, 509-513, 515-525, 527, 528, 532, 533, 535, 538, 540-542, 545-556, 558-563, 565-576, 578-597, 599-618, 620, 624-628, 630, 631, 637-656, 659-662, 665, 667-675, 677-683, 685-697, 701, 704-716, 719-738, 740-757, 759-766, 768-784, 786, 789-796, 800, 801, 803-812, 814-834, 836-865, 867-926, 928-1060, 1062-1094, 1096-1115, 1117-1126, 1129-1135, 1138-1144, 1146-1156, 1159-1165, 1168-1171, 1173-1175, 1177-1192, 1194-1196, 1198-1201, 1203, 1205-1227, 1229, 1232-1250, 1252, 1253, 1255-1258, 1260-1268, 1270-1272, 1274-1293, 1295 and 1296; (b) introducing the candidate compound in the vicinity of an animal; and (c) examining the behavior of the animal to determine whether the animal moves away from the candidate compound wherein the movement away from the candidate compound indicates that the candidate compound repels pests.

13. A method for identifying a compound which inhibits a mouse OR comprising (a) contacting a candidate compound with a mouse OR protein under condition that allow the mouse OR protein to interact with the target protein and (b) monitoring for contact between the mouse OR protein and the candidate compound using an assay wherein said mouse protein is encoded by a nucleotide sequence selected from the group consisting of SEQ NOS: 4-6, 8, 12-14, 16-27, 30-50, 52, 53, 55-69, 72-86, 88-92, 97-100, 102-121, 123, 125, 127-144, 146-152, 154-164, 167, 168, 171-173, 175-182, 184-191, 193, 194, 196-205, 207, 209-214, 216-219, 221-225, 227-245, 250-252, 254, 256-260, 264-270, 273-281, 285-292, 294, 296-300, 303, 304, 306-313, 315-318, 320, 322-329, 331-335, 339-352, 354, 355, 357-388, 391, 393-426, 428, 429, 432-468, 470-486, 488-495, 497-507, 509-513, 515-525, 527, 528, 532, 533, 535, 538, 540-542, 545-556, 558-563, 565-576, 578-597, 599-618, 620, 624-628, 630, 631, 637-656, 659-662, 665, 667-675, 677-683, 685-697, 701, 704-716, 719-738, 740-757, 759-766, 768-784, 786, 789-796, 800, 801, 803-812, 814-834, 836-865, 867-926, 928-1060, 1062-1094, 1096-1115, 1117-1126, 1129-1135, 1138-1144, 1146-1156, 1159-1165, 1168-1171, 1173-1175, 1177-1192, 1194-1196, 1198-1201, 1203, 1205-1227, 1229, 1232-1250, 1252, 1253, 1255-1258, 1260-1268, 1270-1272, 1274-1293, 1295 and 1296.

14. A method for identifying a compound that stimulates a mouse OR comprising (a) contacting a candidate compound with a mouse OR protein under condition that allow the mouse OR protein to interact with the target protein and (b) monitoring for contact between the mouse OR protein and the candidate compound using an assay wherein said mouse protein is encoded by a nucleotide sequence selected from the group consisting of SEQ NOS: 4-6, 8, 12-14, 16-27, 30-50, 52, 53, 55-69, 72-86, 88-92, 97-100, 102-121, 123, 125, 127-144, 146-152, 154-164, 167, 168, 171-173, 175-182, 184-191, 193, 194, 196-205, 207, 209-214, 216-219, 221-225, 227-245, 250-252, 254, 256-260, 264-270, 273-281, 285-292, 294, 296-300, 303, 304, 306-313, 315-318, 320, 322-329, 331-335, 339-352, 354, 355, 357-388, 391, 393-426, 428, 429, 432-468, 470-486, 488-495, 497-507, 509-513, 515-525, 527, 528, 532, 533, 535, 538, 540-542, 545-556, 558-563, 565-576, 578-597, 599-618, 620, 624-628, 630, 631, 637-656, 659-662, 665, 667-675, 677-683, 685-697, 701, 704-716, 719-738, 740-757, 759-766, 768-784, 786, 789-796, 800, 801, 803-812, 814-834, 836-865, 867-926, 928-1060, 1062-1094, 1096-1115, 1117-1126, 1129-1135, 1138-1144, 1146-1156, 1159-1165, 1168-1171, 1173-1175, 1177-1192, 1194-1196, 1198-1201, 1203, 1205-1227, 1229, 1232-1250, 1252, 1253, 1255-1258, 1260-1268, 1270-1272, 1274-1293, 1295 and 1296.

15. A data mining method for identifying gene family members comprising
(a) providing reference organism gene family sequences, candidate organism gene family sequences and query sequences;
(b) performing a low stringency TBLASTN search using the query sequence to obtain a pool of potential candidate sequences from a candidate organism database;
(c) building a profile Hidden Markov Model (HMM) using sequences from the reference and candidate organism to generate a profile HMM;
(d) comparing the pool of potential candidate sequences with the profile HMM to generate a pool of candidate sequences; and
(e) determining whether the candidate sequences obtained in step (d) are gene family members.

16. A method for identifying OR sequences comprising
(a) providing reference organism gene family sequences, candidate organism gene family sequences and query sequences;
(b) performing a low stringency TBLASTN search using the query sequences obtain a pool of potential candidate OR sequences;
(c) building a profile Hidden Markov Model (HMM) using the OR sequences from a reference organism and a candidate organism to generate a profile HMM;
(d) comparing the pool of potential candidate OR sequences with the profile HMM to generate a pool of candidate OR sequences; and
(e) determining whether the candidate sequences obtained in step (d) are OR gene family members.
